(19) United States
(12) Patent Application Publication
(10) Pub. No.: US 2023/0203157 A1
(43) Pub. Date: Jun. 29, 2023

(54) BISPECIFIC MOLECULES FOR SELECTIVELY MODULATING T CELLS

(71) Applicant: Dana-Farber Cancer Institute, Inc., Boston, MA (US)

(72) Inventors: James Torchia, Boston, MA (US); Gordon J. Freeman, Brookline, MA (US)

(21) Appl. No.: 17/927,529

(22) PCT Filed: May 27, 2021
(86) PCT No.: PCT/US2021/034526

§ 371 Date: Nov. 23, 2022

Related U.S. Application Data
(60) Provisional application No. 63/030,714, filed on May 27, 2020.

(51) Int. Cl. C07K 16/28; C07K 16/30; C12N 15/63

(52) U.S. Cl. CPC C07K 16/2803; C07K 16/30; C12N 15/63; C07K 2317/31; C07K 2317/52; C07K 2317/92

(57) ABSTRACT

The present invention relates, in part, to methods for inhibiting activation of T cells in a cell-specific and/or tissue-specific manner, and to bispecific molecules comprising a first part that specifically binds to PD-1 and a second part that specifically binds to a surface antigen of a target cell other than a T cell.

### CROSS-REFERENCE TO RELATED APPLICATIONS

[0001] This application claims the benefit of priority to U.S. Provisional Application Serial No. 63/030,714, filed on 27 May 2020; the entire contents of said application is incorporated herein in its entirety by this reference.

### STATEMENT OF RIGHTS

[0002] This invention was made with government support under grant number P01 AI056299 awarded by the National Institutes of Health. The government has certain rights in the invention.

### BACKGROUND OF THE INVENTION

[0003] Despite significant advances in various immunotherapies, serious complications continue to present themselves in various contexts. For example, when one receives a solid organ transplantation, systemic immunosuppressants can be used, but they put patients at risk for infection, cancer, and drug toxicity. As another example, autoimmune diseases can also be treated to some extent with systemic immunosuppressants, but these again put patients at risk for infection, cancer, and drug toxicity.

[0004] In the treatment of some types of cancers, for example leukemia, one is often confronted with graft-versus-host disease (GVHD). After bone marrow transplantation, both GVHD and graft-versus leukemia (GVL) are mediated by allogeneic lymphocytes. Agents that suppress GVHD also suppress GVL. Also, in the treatment of some types of cancers, checkpoint-inhibitor immune related adverse effects (irAE) are observed. Treatment of irAE with high dose steroids or other immunosuppressants can dampen antitumor immunity. Again, in the treatment of some types of cancers, for example using engineered immune cell therapy, one is often confronted with “on-target, off-tumor” toxicity.

[0005] Therefore, there is a need in the field for more advanced immunotherapies and for agents and methods that reduce the complications observed with different immunotherapies.

### SUMMARY OF THE INVENTION

[0006] The present invention is based, at least in part, on the discovery that soluble PD-1 antibodies are not capable of activating PD-1, but that antibodies against PD-1 on a surface can function as an agonist, and that co-localization of PD-1 stimulus with TCR stimulus is necessary for T cell inhibition, suggesting that there are two requirements for PD-1 activation: clustering and co-localization. Agents have been generated and described herein that are capable of selectively inhibiting T cell activation in the context of desired cells, cell types, and/or tissues, while permitting T cell activation elsewhere.

[0007] In some uses of the methods disclosed herein, it is disadvantageous to block the binding of PD-1 with its ligands, PD-L1 and/or PD-L2. In such methods, “non-blocking” anti-PD-1 clones are preferred and used in the relevant embodiments. In other methods disclosed herein, it is advantageous to block the binding of PD-1 with its ligands. In these methods “blocking” clones are preferred.

[0008] In some embodiments, the disclosed bispecific molecules function as an adapter: allowing the presence of a surface antigen to govern PD-1 clustering. Therefore, a higher surface antigen density will likely result in more robust PD-1 clustering to mediate PD-1 agonism and T cell activity inhibition.

[0009] In some aspects, bispecific molecules including a first part that specifically binds to PD-1 and a second part that specifically binds to a surface antigen of a target cell other than a T cell, optionally wherein the bispecific molecule binds to PD-1 on a T cell are disclosed. The simultaneous binding of the bispecific molecule to the surface antigen and to PD-1 (1) facilitates clustering of PD-1, such as in proximity to an immunological synapse; (2) reduces or prevents T cell-toxicity directed to the target cell; or (3) both facilitates clustering of PD-1, such as in proximity to an immunological synapse, and/or reduces or prevents T cell-activity (such as inhibition of intracellular interferon gamma production, cytokine secretion, T cell proliferation, and the like), and/or toxicity directed to the target cell, optionally wherein i) the bispecific molecule binds to PD-1 on a T cell; ii) T cell activity is cytokine production and/or T cell proliferation; iii) at least the first part or the second part comprises a monoclonal or polyclonal antibody, or an antigen-biding fragment thereof; iv) the bispecific molecule has a single binding site for PD-1; and/or v) the bispecific molecule has a single binding site for PD-1 and a single binding site for the surface antigen.

[0010] Numerous embodiments are further provided that may be applied to any aspect of the present invention and/or combined with any other embodiment described herein. For example, in some embodiments, the difference in the K_{d} of binding to PD-1 and the K_{d} of binding to the tissue-specific surface antigen is at least 2-, 3-, 4-, 5-, 6-, 7-, 8-, 9-, 10-, 11-, 12-, 13-, 14-, 15-, 16-, 17-, 18-, 19-, 20-, 21-, 22-, 23-, 24-, 25-, 26-, 27-, 28-, 29-, 30-, 31-, 32-, 33-, 34-, 35-, 36-, 37-, 38-, 39-, 40-, 41-, 42-, 43-, 44-, 45-, 46-, 47-, 48-, 49-, 50-, 55-, 60-, 65-, 70-, 75-, 80-, 85-, 90-, 95-, 100-, 150-, 200-, 250-, 300-, 350-, 400-, 450-, 500-, 600-, 700-, 800-, 900-, 1,000-, 2,000-, 3,000-, 4,000-, 5,000-, 6,000-, 7,000-, 8,000-, 9,000-, 10,000-fold, or more, or any range in between, inclusive, such as 15- to 50-fold, optionally further wherein the K_{d} of binding to PD-1 is less than the K_{d} of binding to the tissue-specific surface antigen. In some embodiments, the difference in the off-rate when binding to PD-1 and the off-rate when binding to the tissue-specific surface antigen is at least 2-, 3-, 4-, 5-, 6-, 7-, 8-, 9-, 10-, 11-, 12-, 13-, 14-, 15-, 16-, 17-, 18-, 19-, 20-, 21-, 22-, 23-, 24-, 25-, 26-, 27-, 28-, 29-, 30-, 31-, 32-, 33-, 34-, 35-, 36-, 37-, 38-, 39-, 40-, 41-, 42-, 43-, 44-, 45-, 46-, 47-, 48-, 49-, 50-, 55-, 60-, 65-, 70-, 75-, 80-, 85-, 90-, 95-, 100-, 150-, 200-, 250-, 300-, 350-, 400-, 450-, 500-, 600-, 700-, 800-, 900-, 1,000-, 2,000-, 3,000-, 4,000-, 5,000-, 6,000-, 7,000-, 8,000-, 9,000-, 10,000-fold, or more, or any range in between, inclusive, such as 15- to 50-fold, optionally further wherein the off-rate of binding to PD-1 is slower than the off-rate of binding to the tissue-specific surface antigen. In some embodiments, the first part specifically binds to PD-1 at a site different from the PD-L1 binding site of PD-1. In some embodiments, the first part blocks binding of neither PD-L1 nor PD-L2 to PD-1. In some such embodiments, the bispecific molecule acts as an agonist of PD-1 at a tissue expressing the surface antigen, but not at a tissue not expressing the surface antigen. In other embodiments, the first part i) specifically binds to PD-1 and blocks the binding of PD-1 with PD-L1 and/or PD-L2 (e.g., such as by binding PD-1 and causing steric hindrance for binding of PD-L1 and/or PD-L2) and/or ii) specifically binds to PD-1 at the PD-L1 and/or PD-L2 binding site of PD-1, such as to block the binding of PD-1 with PD-L1 and/or PD-L2. In some such embodiments, the bispecific molecule acts as an agonist of PD-1 at a tissue expressing the surface antigen, and acts as an antagonist of PD-1 at a tissue not expressing the surface antigen. For example, such a bispecific molecule may be used both as an immune checkpoint inhibitor to treat cancer, as well as a treatment or prophylactic against immune-related adverse events (irAE), such as in a first-line setting as an immune checkpoint inhibitor that carries a lower risk of irAE. For any embodiment described herein, it is contemplated that recitations of percent homology apply to any binding protein, such as a variable sequence of a binding protein and/or a CDR sequence thereof, such as one, two, or three light chain CDR (CDR-L1, CDR-L2, and/or CDR-L3) sequences and/or one, two, or three heavy chain CDR (CDR-H1, CDR-H2, and/or CDR-H3) sequences thereof, such as those listed in Table 4, described elsewhere herein, or otherwise well-known in the art. For example, in certain embodiments, the first part includes an amino acid sequence having at least 60%, 65%, 70%, 75%, 80%, 85%, 90%, or 95% sequence identity with an amino acid sequence selected from the group consisting of sequences listed in Table 1, Table 4A, and Table 4B, optionally wherein the sequence is SEQ ID NO: 30. In certain embodiments, the first part includes an amino acid sequence having at least 60%, 65%, 70%, 75%, 80%, 85%, 90%, or 95% sequence identity with SEQ ID NO: 31. In certain embodiments, the first part includes an amino acid sequence having at least 60%, 65%, 70%, 75%, 80%, 85%, 90%, or 95% sequence identity with an extracellular domain of PD-L1 or PD-L2, optionally wherein the target is a receptor for the extracellular domain and/or the extracellular domain of PD-L1 has the sequence of SEQ ID NO: 24. In some embodiments, the surface antigen is selected from the group of surface antigens listed in Table 3A, Table 3B, and Table 3C, or an MHC class I allele or MHC class II allele, optionally wherein the allele is an HLA allele or wherein the MHC allele is H-2Kb. In certain embodiments, the second part includes an amino acid sequence having at least 60%, 65%, 70%, 75%, 80%, 85%, 90%, or 95% sequence identity with SEQ ID NO: 21. In certain embodiments, the second part includes an amino acid sequence having at least 60%, 65%, 70%, 75%, 80%, 85%, 90%, or 95% sequence identity with SEQ ID NO: 22. In certain embodiments, the bispecific molecule includes an amino acid sequence having at least 60%, 65%, 70%, 75%, 80%, 85%, 90%, or 95% sequence identity with any one among SEQ ID NOs: 1, 2, 3, 4, 5, 6, 7, 8, 9, 10, 11, 12, 13, and 14. In some embodiments, at least the first part or the second part is a chimeric, humanized, composite, murine, or human monoclonal or polyclonal antibody, or antigen-binding fragment thereof. In some embodiments, at least the first part or the second part is detectably labeled, includes an effector domain, includes an Fc domain, and/or is selected from the group consisting of Fv, Fav, F(ab′)2), Fab′, dsFv, scFv, sc(Fv)2, and diabodies fragments.

[0011] In some aspects, isolated nucleic acid molecules are disclosed that encode a bispecific molecule described herein. The isolated nucleic acid molecule may take a number of forms as described further herein, such as RNA, DNA, cDNA, stabilized mRNA, and the like, optionally encoding heterologous sequences and/or comprising additional nucleic acid sequences. In some embodiments, the isolated nucleic acid molecule is one that hybridizes, under stringent conditions, with the complement of a nucleic acid encoding a polypeptide selected from the group consisting of the sequences of SEQ ID NOs: 1-14, 21-26, 28, and 30-31, or a sequence with at least about 95% homology to a nucleic acid encoding a polypeptide selected from the group consisting of the sequences of SEQ ID NOs: 1-14, 21-26, 28, and 30-31. In some aspects, vectors are disclosed, which include such isolated nucleic acids. In some aspects, host cells are disclosed, which include such isolated nucleic acids, vectors, or which express the bispecific molecules disclosed herein, optionally wherein the host cell is genomically engineered and/or is a T cell that expresses a heterologous protein such as a chimeric antigen receptor (CAR).. In some aspects, devices or kits are disclosed, which include at least one bispecific molecule as disclosed, said device or kit optionally including a label to detect the at least one bispecific molecule or a complex including the bispecific molecule. In some aspects, methods of producing at least one bispecific molecule include: (i) culturing a transformed host cell which has been transformed by a nucleic acid including a sequence encoding at least one bispecific molecule as disclosed under conditions suitable to allow expression of said bispecific molecule; and (ii) recovering the expressed bispecific molecule.

[0012] In certain aspects, methods of inhibiting activation of T cells in a cell-specific and/or tissue-specific manner in a sample include contacting the sample with the bispecific molecule of any of the described embodiments herein, optionally wherein the subject is at risk of, suspected of having, or afflicted with a cancer to thereby treat the cancer, are disclosed. In some embodiments of such methods, the bispecific molecule inhibits activation of T cells interacting with the target cell when the bispecific molecule simultaneously binds to the surface antigen and to PD-1.

[0013] In some aspects, methods of inhibiting activation of T cells in a cell-specific and/or tissue-specific manner in a subject include administering to the subject the bispecific molecule of any of the described embodiments herein are disclosed. In some embodiments of such methods, the bispecific molecule inhibits activation of T cells interacting with the target cell when the bispecific molecule simultaneously binds to the surface antigen and to PD-1.

[0014] In some embodiments, the compositions described herein are useful for prophylaxis and/or treatment of a wide variety of conditions, such as cancer. In some embodiment, blocking LoSTIMs are useful for treating cancer and both blocking and non-blocking LoSTIMs are useful for ameliorating checkpoint-inhibitor immune related adverse events (irAE). In some embodiments, the subject is set to receive or has received solid organ transplantation, in which case the surface antigen may be a mismatched MHC class I or class II. In some embodiments, the subject is at risk of, suspected of having, or afflicted with an autoimmune disease to thereby treat the autoimmune disease, in which case the surface antigen may be one that is expressed on pathologically inflamed tissue. In some embodiments, the subject is at risk of, suspected of having, or afflicted with graft-versus-host disease (GVHD) to thereby treat the GVHD, in which case the surface antigen may be one that is expressed on inflamed tissue but not on cancerous cells. For example, the subject may be set to receive or has received an allogeneic bone marrow transplantation, in which case the surface antigen may be one that is expressed on tissues that are commonly affected by GVHD. In some embodiments, the subject at risk of, suspected of having, or afflicted with from checkpoint-inhibitor immune related adverse events (irAE) to thereby treat the irAE, in which case the surface antigen may be one that is expressed on inflamed tissue but not on cancerous cells. For example, compositions described herein may be used as prophylaxis against immune related adverse effects, in which case the surface antigen would be expressed on tissues commonly affected by immune related adverse effects. In some embodiments, the subject is set to receive or has received an engineered immune cell therapy, in which case the surface antigen may be one that is expressed in normal tissues that also express a tumor-associated antigen targeted by the immune cell therapy, but is one that is not expressed on cancerous cells.

### BRIEF DESCRIPTION OF THE DRAWINGS

[0015] The patent or application file contains at least one drawing executed in color. Copies of this patent or patent application publication with color drawing(s) will be provided by the office upon request and payment of the necessary fee.

[0016] FIG. 1A - FIG. 1C show an overview of exemplary LoSTIMs (i.e., bispecific molecules, as described and used in this disclosure). FIG. 1A shows a schematic representation of a LoSTIM. A LoSTIM is a molecule capable of simultaneously binding to PD-1 as well as to an arbitrary cell-specific and/or tissue-specific surface antigen expressed on tissues where inhibition of T cell activity is desired. FIG. 1B shows that an embodiment of a LoSTIM simultaneously binds PD-1 molecules on a T cell as well as molecules of an antigen on the surface of an opposing somatic cell, thereby clustering PD-1 on the T cell surface in proximity to an immunologic synapse between the two cells. This clustering and co-localization of PD-1 inhibits T cell activation. FIG. 1C shows that an embodiment of a LoSTIM binds PD-1 on the T cell but does not bind an antigen on the opposing somatic cell surface since its cognate antigen is not expressed by that cell. Because the LoSTIM is not fixed in place by binding to the opposing cell surface, it is not able to cluster PD-1 or co-localize PD-1 with the immunologic synapse on the T cell surface and therefore does not inhibit T cell activation. In this circumstance, if the PD-1 binding domain of the LoSTIM inhibits the engagement of PD-1 by its natural ligands, the LoSTIM acts as a potentiator of T cell activation.

[0017] FIG. 2 shows representative schematics of LoSTIMs used in some of the studies (e.g., those of Example 1). Four generalized LoSTIM designs were evaluated in the subsequent studies: (1) a PDL1-scFv fusion protein in which the scFv binds to a cell-specific and/or tissue-specific surface antigen expressed on tissues where T cell inhibition is desired; (2) a PDL1-mAb fusion in which the mAb is directed against a cell-specific and/or tissue-specific surface antigen expressed on tissues where T cell inhibition is desired; and (3) & (4), bispecific monoclonal antibodies with avidity for PD-1 and for a cell-specific and/or tissue-specific surface antigen expressed on tissues where T cell inhibition is desired. LoSTIMs 1 through 4 have bispecific avidity for Thy1.2 (CD90.2) and mouse PD-1. The anti-Thy 1.2 binding domain is the variable region of the anti-Thy 1.2 clone AF6 and the anti-PD-1 binding domain is via the variable region of anti-PD-1 clone 29F.1A12 (1A12). LoSTIMs 5 through 8 have bispecific avidity for H-2Kb (a C57B6 class I MHC allele) and mouse PD-1. The anti-H-2Kb binding domain is the variable region of the anti-H-2Kb clone AF6-88.5.3 (AF6). It should be noted that the anti-PD-1 clone 1A12 is known to block the interaction of PD-1 with its natural ligands and function as a PD-1 antagonist. The CH1, CH2, and CH3 domains of the antibody LoSTIMs contain several point mutations known to inhibit C1q and Fc gamma receptor binding, thus rendering these Fc domains “inert.” The sequences of these LoSTIMs are presented in an appendix at the end of this document.

[0018] FIG. 3A - FIG. 3D show LoSTIM binding results. FIG. 3A shows experimental results in which 300-mPD-1 cells, transgenic mouse pro-B cells which overexpress mouse PD-1, were exposed to varying concentrations of LoSTIMs 2-4 and 6-8. Binding was detected via an anti-mIgG2a-PE conjugate. FIG. 3B shows data from FIG. 3A normalized to allow for a better assessment of relative PD-1 avidities. FIG. 3C shows experimental results in which bone-marrow-derived dendritic cells (BMDCC) generated from C57B6 bone marrow cells cultured with GM-CSF for 8 days were exposed to varying concentrations of LoSTIMs 6-8. Binding was detected via an anti-mIgG2a-PE conjugate. FIG. 3D shows experimental results in which BMDDC were exposed to varying concentrations of LoSTIMs 6-8. Unbound LoSTIM was first washed away and then bispecific binding was assessed by detecting the binding of a mouse PD-1-human Fc fusion protein. An anti-human IgG-PE conjugate was used as the detector. This demonstrated that the LoSTIMs were capable of binding both H-2Kb and PD-1 simultaneously.

[0019] FIG. 4 shows that OT-I T cell activation by SIINFEKL-pulsed bone-marrow-derived dendritic cells (BMDDC) is inhibited by LoSTIMs. C57B6 bone marrow cells were cultured with GM-CSF for 8 days to yield BMDDC. These BMDDC were pulsed with 10 micromolar of Ser-Ile-Ile-Asn-Phe-Glu-Lys-Leu (SIINFEKL) peptide for 6 hours, washed, then co-cultured with CFSE-labeled OT-I CD8a+ T cells, which express a recombinant TCR that recognizes SIINFEKL in the context of H-2Kb. These T cells were obtained via negative magnetic selection from OT-I mouse splenocytes. The co-cultures were treated with 0.5 micromolar of the anti-H-2Kb-directed LoSTIMs 5, 6, 7, or 8. Cells were co-cultured for 72 hours. The histograms presented above represent populations gated on CD8+ cells. OT-I T cells cultured without BMDDC were inactive (1.4% proliferation by CFSE dilution). OT-I T cells stimulated with BMDDC were activated (87.3% proliferation by CFSE dilution). LoSTIM 5 had negligible effect on the activation OT-I T cells by BMDDC (84.3% proliferation by CFSE dilution). LoSTIM 6 inhibited OT-I T cell activation by BMDDC (62.4% proliferation by CFSE dilution). LoSTIM 7 inhibited OT-I T cell activation by BMDDC most potently (43.9% proliferation by CFSE dilution). LoSTIM 8 had an effect on OT-I T cell activation (78.4% proliferation by CFSE dilution).

[0020] FIG. 5 shows that LoSTIM-mediated inhibition of OT-I T cell activation is not due to H-2Kb blockade and requires a LoSTIM that can engage PD-1. To address whether inhibition of OT-I activation by SIINFEKL-pulsed BMDDC was simply due to blockade of H-2Kb antigen presentation by LoSTIMs, CFSE-labeled OT-I CD8a+ T cells were cocultured with BMDDC in the presence of 0.5 micromolar of anti-H-2Kb, clone AF6. The H-2Kb binding domains of LoSTIMs 5-8 are derived from this clone, so AF6 would be expected to bind the same epitope of H-2Kb as LoSTIMs 5-8. After 57 hours of co-culture, OT-I T cell activation was assessed by CFSE dilution and CD69 expression. OT-I cells co-cultured with BMDDC in the absence of antibody treatment were activated (63.6% proliferation by CFSE dilution and 42.6% CD69 expression). The addition of anti-H-2Kb clone AF6 to such a co-culture did not inhibit T cell activation (73.4% proliferation by CFSE dilution and 67.4% CD69 expression). Addition of equimolar quantities of anti-H-2Kb clone AF6 and LoSTIM 7 to such a co-culture did result in some inhibition of T cell activation (42.5% proliferation by CFSE dilution and 38.8% CD69 expression).

[0021] FIG. 6 shows that allogeneic T cell activation is inhibited by LoSTIM treatment. To address whether LoSTIM molecules can inhibit the activation of T cells by allogeneic cells, C57B6 BMDDC were co-cultured with CFSE-labeled BALB/c CD8 T cells for 84 hours in the presence of LoSTIMs 5-8 at 0.5 micromolar. BALB/c CD8 T cells co-cultured with BMDDC derived from C57B6 mice were potently activated (91.8% proliferation by CFSE dilution). Treatment of such a co-culture with LoSTIM 5 had only a minimal inhibitory effect on T cell activation (85.5% proliferation by CFSE dilution). Treatment with LoSTIM 6 inhibited T cell activation (71.1% proliferation by CFSE dilution). Treatment with LoSTIM 7 resulted in the most potent inhibition of T cell activation (63.6% proliferation by CFSE dilution). Treatment with LoSTIM 8 also resulted in inhibition of T cell activation (69.1% proliferation by CFSE dilution).

[0022] FIG. 7A - FIG. 7B show that a LoSTIM binds the surface of an interacting cell to inhibit T cell activation, and that a LoSTIM that inhibits the binding of PD-1 to its natural ligands will potentiate T cell activation if it does not also bind the surface of the interacting cell. To determine whether binding of a LoSTIM to the surface of an opposing cell is necessary for the inhibition of T cell activation, CFSE-labeled OT-I CD8 T cells were co-cultured with SIINFEKL-pulsed BMDDC in the presence of LoSTIMs 1-4 at 0.5 micromolar for 57 hours (FIGS. 7A and 7B). LoSTIMs 1-4 are identical in molecular design to LoSTIMs 5-8 except that they carry a Thy1.2 (CD90.2) binding domain instead of an H-2Kb binding domain. Since BMDDCs do not express Thy1.2 (panel B above), LoSTIMs 1-4 will not bind the surface of the BMDDCs. These LoSTIMs carry the same PD-1 binding domain as LoSTIMs 5-8 and, therefore, they will still bind PD-1 on T cells. OT-I cells co-cultured with BMDDC in the absence of antibody treatment were activated (63.6% proliferation by CFSE dilution and 42.6% CD69 expression). Treatment with LoSTIMs 1-4 did not inhibit T cell activation in these co-cultures. In fact, LoSTIMs 1-4 potentiated T cell activation to varying degrees. LoSTIM 1 had a minimal potentiating effect on T cell activation (68.4% proliferation and 56% CD69 expression). LoSTIM 2 markedly potentiated T cell activation (98.6% proliferation and 78.9% CD69 expression). LoSTIM 3 also potentiated T cell activation (90.1% proliferation and 61% CD69 expression). LoSTIM 4 also markedly potentiated T cell activation (96.1% proliferation and 79% CD69 expression).

[0023] FIG. 8 shows a representative conceptual overview. The trans bispecific binding of a LoSTIM to PD-1 on the T cell and to a cell-surface antigen on the opposing target cell results in PD-1 clustering on the T cell surface and co-localization of this cluster with the immunological synapse, thereby activating PD-1 and inhibiting T cell activity. PD-1 is free to move laterally on the T cell surface and it is activated when clustered in proximity to the immunological synapse. Thus, trans bispecific binding of the LoSTIM to the surface antigen on the target cell and to PD-1 on the T cell will recruit and cluster PD-1 at the cell-cell interface, where the immunological synapse is located. This activates PD-1, resulting in inhibition of TCR signaling and T cell activity. Engagement of the antigen on the target cell surface is necessary for a LoSTIM to function as a PD-1 agonist: simply binding PD-1 alone will not cluster and co-localize PD-1 to the immunological synapse and will therefore not inhibit T cell activity. This property allows a LoSTIM to function as selective PD-1 agonist, inhibiting T cell activity only in tissues that express the surface antigen. A LoSTIM may or may not be designed to block the engagement of PD-1 by its natural ligands. If it is designed to block the engagement of PD-1 by its ligands, it will act as an antagonist of PD-1 on T cells interacting with tissues that do not express the surface antigen, while still acting as an agonist of PD-1 on T cells interacting with tissues that do express the surface antigen. A single LoSTIM molecule of this design will therefore function as either an inhibitor or potentiator of T cell activity depending on the tissue context.

[0024] FIG. 9 shows binding to cells that express a model surface antigen H-2K^{b}. Binding to H-2K^{b} was assessed by flow cytometry using the C57BL/6 colorectal cancer cell line MC38, which is known to express H-2K^{b}. Specificity was demonstrated by assessing binding to CT-26 cells, a BALB/c colorectal cancer cell line known not to express H-2Kb. The LoSTIM bound avidly to MC38 cells but not to CT-26 cells. In a separate experiment, binding to H-2K^{b} was assessed by flow cytometry using BMDDC from C57BL/6 mice, which express H-2K^{b}, or BMDDC from C3H mice, which do not express H-2K^{b}. The LoSTIM bound avidly to C57BL/6 BMDDC cells but not to C3H BMDDC cells.

[0025] FIG. 10 shows binding to PD-1 and bispecific binding to PD-1 and H-2K^{b}. Binding of the LoSTIM to PD-1 was assessed by flow cytometry using 300-mPD-1 cells, transgenic mouse pro-B cells that stably express mouse PD-1. The LoSTIM bound 300-mPD-1 cells avidly. Bispecific binding to PD-1 and H-2K^{b} was assessed by flow cytometry using MC38 cells, which express H-2K^{b} but not PD-1, and a soluble mouse PD-1-Fc fusion bearing a human IgG1 Fc domain (mPD-1-hFc). Unbound LoSTIM was first washed away before the cells were exposed to the mPD-1-hFc fusion. Binding of the mPD-1-hFc to MC38 cells as measured by a fluorophore-labeled an anti-human IgG secondary antibody indicated that the LoSTIM was capable of binding to both H-2K^{b} on MC38 cells and to the mPD-1-hFc simultaneously. This also confirmed the specificity of PD-1 binding.

[0026] FIG. 11 shows binding to T cells that express PD-1, but not to T cells that do not express PD-1. To further confirm PD-1 binding specificity, binding of the LoSTIM to activated primary T cells that express PD-1 was compared with binding to naive primary T cells that do not express PD-1. These T cells were obtained from mice from BALB/cByJ mice that do not express H-2K^{b}, therefore binding to activated T cells should only occur if the LoSTIM binds specifically to PD-1. The LoSTIM bound avidly to activated BALB/cByJ T cells but not to naive BALB/cByJ T cells, further confirming the specificity of PD-1 binding.

[0027] FIG. 12 shows inhibition of T cell activation. To assess the effect of the LoSTIM on T cell activation by APCs that express the H-2K^{b} model surface antigen, primary CD4+ BALB/cByJ T cells (H-2K^{b} negative) were co-cultured with B-cells obtained from C57BL/6 mice (H-2K^{b} positive) at a 1:1 ratio for five days. Cultures were treated with 500 nanomolar of either LoSTIM, the parent anti-H-2K^{b} antibody (AF6-88.5.3), the parent anti-PD-1 antibody (29F.1A12), or vehicle (PBS). The LoSTIM completely inhibited APC-induced proliferation of T cells as measured by CFSE dilution. Neither AF6-88.5.3, 29F.1A12, nor vehicle affected T cell proliferation. This demonstrates that the LoSTIM inhibits T cell activation by APCs that express a surface antigen that binds the LoSTIM. The bispecific binding of the LoSTIM to PD-1 on the T cell and to the surface antigen on the target cell was necessary for this effect, as demonstrated by a lack of T cell inhibition by either AF6-88.5.3, which binds the model surface antigen H-2K^{b}, or 29F.1A12, which binds PD-1. In a similar separate experiment, two concentrations of LoSTIM were used and the inhibition of T cell proliferation was found to be dose-dependent.

[0028] FIG. 13 shows inhibition of TCR signaling. To assess the effect on TCR signaling, CD8+ T cells expressing a transgenic TCR that recognizes the ovalbumin antigen SIINFEKL were purified from OT-1 mice, activated by plate-bound anti-CD3/CD28 antibody, rested, and then re-stimulated by C57BL/6 cells loaded with the SIINFEKL antigen. TCR activation was assessed by phosphoflow cytometry using a fluorophore-labeled antibody specific for phosphorylated Zap70. Zap70 is a membrane-proximal kinase that is phosphorylated and activated upon TCR activation and is responsible for TCR signal transduction. PD-1 activation is known to inhibit TCR-mediated Zap70 phosphorylation. Treatment with LoSTIM inhibited antigen-induced Zap70 phosphorylation.

[0029] FIG. 14 shows cell-specific and/or tissue-specific inhibition of T cell activation. The effect of the LoSTIM was compared when T cells were co-cultured with APCs that express the model cell surface antigen H-2K^{b} and when T cells were co-cultured with APCs that do not express H-2K^{b}. To accomplish this, purified BALB/cByJ CD8+ T cells were co-cultured with either BMDDC from C57BL/6 mice, which express the model cell surface antigen H-2K^{b}, or BMDDC from C3H mice, which do not express H-2K^{b}. Cultures were treated with varying concentrations of LoSTIM. Relative T cell proliferation was calculated by normalizing the percentage T cell proliferation by the percentage T cell proliferation of co-cultures treated with vehicle (PBS). Because the strength of allostimulation can vary between backgrounds, this calculation was performed separately for BALB/cByJ T cells stimulated by C57BL/6 BMDDC and C3H BMDDC. T cell activation was inhibited when the LoSTIM bound the target cell but did was not inhibited when the LoSTIM did not bind the target cell.

[0030] FIG. 15 shows inhibition of allorejection in vivo. A model of allorejection was used to assess the ability of the LoSTIM to inhibit immune activity in vivo against target cells that express an antigen that binds the LoSTIM. MC38 cells (of C57BL/6 origin) were injected subcutaneously in BALB/cByJ mice. Normally, the MC38 tumor will be rejected in the BALB/cByJ mice by an alloresponse to its different MHC. Increased tumor growth indicates that this alloresponse is ameliorated. Tumor volumes were significantly larger in mice that received intraperitoneal injections of LoSTIM when compared with mice that received PBS as a vehicle control (p = 0.0297). This demonstrates that the LoSTIM can inhibit immune activity against target cells in vivo, if the target cells express an antigen to which the LoSTIM binds. Note that purified LoSTIM monomer (discussed in FIG. 17 below) was used for this experiment.

[0031] FIG. 16 shows treatment of syngeneic tumor in vivo. A model of syngeneic tumor treatment was used to assess the in vivo effect of the LoSTIM on immune activity against target cells that do not express an antigen that binds the LoSTIM. CT-26 cells were injected subcutaneously in BALB/cByJ mice and mice were treated with either LoSTIM, 29F.1A12 (the parent anti-PD-1 antibody used in design of the LoSTIM), or PBS as a vehicle control. The LoSTIM did not inhibit immune activity against CT-26 cells. Instead, the LoSTIM promoted immune activity against CT-26 cells, functioning similarly to the PD-1 inhibitor 29F.1A12. This demonstrates that the LoSTIM will not inhibit immune activity against target cells that do not express an antigen to which it binds. Moreover, it demonstrates that a LoSTIM that blocks the natural ligation of PD-1 will function as a PD-1 inhibitor in these contexts and can treat tumor. Note that purified LoSTIM monomer (discussed in FIG. 17 below) was used for this experiment.

[0032] FIG. 17 shows size exclusion ultra-performance liquid chromatography (SE-UPLC) analysis of LoSTIM 8, which was used in experiments presented in FIGS. 3, 4, 5, 6, 7, 10, 12, and 14 (upper left panel). 89% of the species are 220 kDa in size, the approximate expected molecular weight of LoSTIM 8, and 11% of the species have larger molecular weights, representing multimers (pentamers and trimers) of the LoSTIM (right panels). After preparative size-exclusion chromatography was performed, SE-UPLC analysis confirmed that 85% of the multimers were removed and 98.4% of the remaining species were LoSTIM monomer (lower left panel).

[0033] FIG. 18 shows the effect of purified LoSTIM monomer and purified multimers on T-cell activation. To assess the effect of each molecular species on T cell activation, primary CD4+ BALB/cByJ T cells (H-2K^{b} negative) were co-cultured with B-cells obtained from C57BL/6 mice (H-2K^{b} positive) at a 1:1 ratio for five days. Cultures were treated with indicated concentrations of either LoSTIM that was not purified or LoSTIM monomer that was purified by preparative size-exclusion chromatography. Unpurified LoSTIM inhibited T-cell proliferation at 250 nM and 500 nM however, unexpectedly, purified LoSTIM monomer did not inhibit T-cell proliferation at these concentrations. This indicates that T-cell inhibition at these concentrations was due to the multimers. Consistent with this indication, purified high molecular weight multimers (HMW 1 or HMW 2) were capable of potently inhibiting T-cell proliferation at approximately the concentration (18 nM - 33 nM) that they were present in 250 nM of unpurified LoSTIM that was comprised of 11% multimers. It will also be appreciated that the larger HMW 1 species appeared to inhibit T-cell proliferation more potently than HMW 2, which may be due to a larger number of PD-1 binding sites resulting in more potent PD-1 clustering.

[0034] FIG. 19 shows tissue-specific inhibition of T cell activation by purified LoSTIM monomer. CFSE-labeled BALB/c CD8 T cells were cultured with BMDC from either C57BL/6 (H-2K^{b} positive) or C3H mice (H-2K^{b} negative) in the presence of varying concentrations of purified LoSTIM monomer. The LoSTIM potently inhibited T-cell activation by C57BL/6 target cells that bind the LoSTIM (H-2K^{b} positive) but did not inhibit T-cell activation by C3H target cells that do not bind the LoSTIM (H-2K^{b} negative). Unexpectedly, the inhibitory effect of the LoSTIM occurred maximally within a specific concentration range before it appeared to diminish as the concentration was further increased.

[0035] FIG. 20 shows inhibition of T-cell activation by purified LoSTIM monomer in another model system. CFSE-labeled OT-I CD8+ T-cells were co-cultured with SIINFEKL-pulsed BMDC from C57BL/6 mice in the presence of varying concentrations of purified LoSTIM monomer. CFSE mean fluorescence intensity (MFI) was used as a metric of T-cell proliferation and activation, with lower values indicating more T-cell proliferation. Again, the LoSTIM inhibited T-cell activation most potently in a specific concentration range, with the inhibitory effect becoming more pronounced as the concentration was increased before then becoming less pronounced. Surprisingly, the LoSTIM actually enhanced rather than inhibited T-cell activation at the highest concentration tested.

[0036] FIG. 21 shows that LoSTIM-mediated T-cell inhibition occurs at concentrations where binding to both of its cognate antigens is not saturated. As demonstrated in the preceding two figures and reproduced in the two panels on the right of this figure, the LoSTIM inhibited T-cell activation at 0.4 nM, 4 nM, and 40 nM in both model systems, whereas, at 400 nM, its inhibitory effect was diminished in the allogeneic T-cell activation model and was absent in the model antigen (SIINFEKL) model. In fact, T-cell activation by SIINFEKL-pulsed BMDC was enhanced, not inhibited, at the 400 nM concentration. Comparison can be made to binding curves for each of the LoSTIMs cognate antigens (PD-1 and H-2Kb) overlaid in the left panel of this figure, which were generated by measuring binding separately to H-2Kb+ C57BL/7 BMDC and to PD-1+ activated T-cells. Binding to the lowest affinity binding partner begins to approach saturation at around 100 nM and appears to be saturated around 1000 nM. This is the concentration range where the inhibitory effect of the LoSTIM is lost in both model systems. Binding must still occur to both binding partners for an inhibitory effect to occur, though, and thus a difference in binding affinity for the two binding partners is advantageous and a wider difference should yield a broader range of concentrations where the LoSTIM can inhibit T-cells. Therefore, a LoSTIM that has a larger difference in measured K_{d} between its binding partners would be expected to mediate T-cell inhibition over a wider range of concentrations than a LoSTIM where the K_{d} for each of the binding partners is more similar.

[0037] FIG. 22 shows that bispecific binding increases before decreasing sharply as LoSTIM concentration rises in an experimental model where competition between bispecific and monospecific binding is allowed. MC38 cells (H-2K^{b}-positive, PD-1 negative) were incubated with varying concentrations of LoSTIM in the presence of a fixed concentration of recombinant mouse PD-1 extracellular domain fused to human PD-1 (mPD-1-hFc). After thoroughly washing away any protein that did not bind to the cells, cells were stained with anti-human IgG-PE to detect mPD-1-hFc bound to the cells via bispecific LoSTIM binding. This experiment demonstrated that, when competition is allowed between monospecific binding to each binding partner and bispecific binding to both binding partners simultaneously, bispecific binding occurs over a limited concentration range. The consequences of this for LoSTIM-mediated T-cell inhibition are depicted in the schematic on the right of the figure. When the LoSTIM is present at a concentration where bispecific binding is favored (a concentration where both binding partners are not saturated), bispecific binding allows the presence of a tissue-specific surface antigen on a target cell to cluster PD-1 on a T-cell interacting with that cell, and therefore inhibit the T-cell. Monospecific binding does not allow for this, though, and if the LoSTIM is present at a concentration where monospecific binding is favored, such as at concentrations at or above where binding to each binding partner is saturated, the presence of a tissue-specific surface antigen will not result in PD-1 clustering and T-cell inhibition will not occur, even if the LoSTIM is capable of binding to that antigen. This is consistent with the results presented in the preceding three figures.

[0038] FIG. 23 shows that a bivalent monospecific anti-PD-1 antibody can function to enhance immune-mediated clearance of tumor even if it does not block the ligation of PD-1 by PD-L1 or PD-L2. A bivalent monospecific antibody has one binding partner/antigenic determinate and has two binding sites for that binding partner/antigenic determinate. An example of this is a standard IgG antibody. 5E12 is a standard IgG antibody that binds PD-1 but does not block the interaction between PD-1 and PD-L1 or PD-L2. The upper left panel of this figure demonstrates that 5E12 binds avidly to 300-mPD-1 cells. The left middle and lower panels confirm this by demonstrating that increasing concentrations of 5E12 do not block the binding of recombinant mouse PD-L1 or PD-L2 Fc fusions (mPD-L1-Fc or mPD-L2 Fc) to 300-mPD-1 cells. The right panels assess the effect of 5E12 antibody on tumor growth in the model of tumor allorejection that was used to assess the ability of a LoSTIM to inhibit immune cell activity in vivo presented in FIG. 15. MC38 cells (of C57BL/6 origin) were injected subcutaneously in BALB/cByJ mice. Normally, the MC38 tumor will be rejected in BALB/cByJ mice by an alloresponse to its different MHC, but treatment with LoSTIM results in significantly larger tumors and longer average persistence of tumor before rejection. Two additional experimental conditions are presented in this figure: (1) concurrent treatment with LoSTIM plus 5E12 antibody and (2) treatment with 5E12 antibody alone. Concurrent treatment with LoSTIM and 5E12 reduced the protective effect of the LoSTIM, resulting in lower average tumor volumes and faster tumor rejection. Treatment with 5E12 alone significantly enhanced tumor clearance relative to vehicle control to the extent that no tumor growth was measurable. This enhancement of tumor clearance might be expected with an anti-PD-1 antibody that blocks the ligation of PD-1 by PD-L1 and/or PD-L2 but it is unexpected with an anti-PD-1 antibody that does not block PD-1 ligation. It is believed that the 5E12 antibody is capable of binding two PD-1 molecules on the T-cell surface and stabilizing these molecules in some orientation or some distance with respect to one another that is incompatible with their activation or that inhibits their activation. A LoSTIM with a single binding site for PD-1, such as a monovalent bispecific LoSTIM, is believed to allow the use of anti-PD-1 clones, such as 5E12, that may be incompatible with PD-1 activation when present in a bivalent form.

### DETAILED DESCRIPTION OF THE INVENTION

[0039] The present invention is based, at least in part, on the discovery that bispecific molecules that bind PD-1 and a surface antigen on a target cell different from a T cell can function as PD-1 agonists in a cell-specific and/or tissue-specific manner.

[0040] Accordingly, the present invention provides, among various aspects, bispecific molecules that are PD-1 agonists in desired cell, cell type, and/or tissue contexts, and thereby inhibit activation of T cells in such contexts, while being neither agonists nor antagonists of T cells in other tissues. The present invention also provides, among various aspects, bispecific molecules that are PD-1 agonists in some contexts, and thereby inhibit activation of T cells in such contexts, while being antagonists of PD-1 in other contexts, thereby potentiating activation of T cells in these other contexts.

[0041] The present invention also provides, among various aspects, methods related to inhibiting activation of T cells in a cell-specific and/or tissue-specific manner. Such methods may be used in the prevention of solid organ graft rejection, treatment of autoimmune diseases, treatment of cancer, and treatment of graft-versus-host disease.

[0042] In various embodiments, bispecific molecules of four broad design categories are disclosed. A first category includes bispecific antibodies (including IgG, IgM, and IgA monoclonal antibodies or variants). If a bispecific antibody is used, the Fc domain may contain modifications to decrease its binding to Fcy receptors. A second category includes natural ligands for PD-1 fused to antibodies or scFv against the surface antigen on cells on tissues in the body where the inhibition of T cell activity is desired. If ligand is fused to an antibody, the Fc domain may contain modifications to decrease its binding to Fcy receptors. A third category includes natural ligands for the surface antigen on cells on tissues in the body where the inhibition of T cell activity is desired (if one exists) fused to an antibody or scFv against PD-1. If ligand is fused to an antibody, the Fc domain may contain modifications to decrease its binding to Fcy receptors. A fourth category includes natural ligands for PD-1 fused to a natural ligand for the surface antigen on cells on tissues in the body where the inhibition of T cell activity is desired (either a direct fusion or as an Fc fusion). If an Fc fusion is used, the Fc domain may contain modifications to decrease its binding to Fcy receptors.

[0043] For each of these categories, the bispecific molecules may have various features. For example, the interaction with PD-1 may or may not block its ligation by natural ligands. As another example, the valency of binding (number of binding sites) for each antigenic determinant (either PD-1 or surface antigen on cells on tissues in the body where the inhibition of T cell activity is desired) may be any of the following: (1) monovalent, when there is one antigen binding domain (either a FAB region, scFv, or a natural ligand) for a given antigenic determinant (PD-1 or surface antigen on cells on tissues in the body where the inhibition of T cell activity is desired); (2) bivalent, when there are two antigen binding domains for a given antigenic determinant; and (3) multivalent, when there are multiple antigen binding domains for a given antigenic determinant. In addition, the stoichiometric ratio of PD-1 to surface antigen binding may vary: the number of binding domains for PD-1 may be equal to the number of binding domains for the surface antigen; there may be more PD-1 binding domains than surface antigen binding domains (e.g., 1, 2, 3, 4, 5, 6, or more PD-1 binding domains than surface antigen binding domains); or there may be more surface antigen binding domains than PD-1 binding domains (e.g., 1, 2, 3, 4, 5, 6, or more surface antigen binding domains than PD-1 binding domains).

[0044] The bispecific molecules, when used in various methods, may be therapeutically administered in many forms. For example, they may be administered as a therapeutic protein. As another example, they may be administered as a nucleic acid encoding the therapeutic protein (e.g., stabilized mRNA, DNA in an appropriate vector, and the like). As another example, they may be in the form of cells that are engineered to express the therapeutic protein (e.g., a CAR-T cell that is transformed with a nucleic acid that encodes the therapeutic protein).

[0045] The disclosed bispecific molecules may function as pharmacologic PD-1 agonists capable of inhibiting T cell activation. In some embodiments, the bispecific molecules may function as systemic pharmacologic immunosuppressants that inhibit T cell activity on some tissues but not others as a consequence of their design. In some embodiments, the bispecific molecules may function as pharmacologic agents that may both inhibit or potentiate T cell activity in different tissue contexts as a consequence of their design. Some embodiments, allow fashioning a PD-1 binding domain of an antibody clone that is known to inhibit PD-1 as a pharmacologic agonist of PD-1. Such a pharmacologic agonist of PD-1 may inhibit T cell activity in certain tissue contexts, but exhibit either no activity or a potentiating effect on T cell activity in other tissue contexts.

[0046] The disclosed bispecific molecules may inhibit T cell activity in certain tissues or cell types while simultaneously either potentiating or having no effect on T cell activity in other tissues. Several potential applications of the disclosed bispecific molecules for the treatment of various conditions are further described in Section VI, titled Uses and Methods of the Invention.

### I. Definitions

[0047] The articles “a” and “an” are used herein to refer to one or to more than one (i.e., to at least one) of the grammatical object of the article. By way of example, “an element” means one element or more than one element.

[0048] The term “altered amount” of a marker refers to increased or decreased copy number of a marker and/or increased or decreased nucleic acid level of a particular marker gene or genes in a sample, as compared to that of the marker in a control sample. The term “altered amount” of a marker also includes an increased or decreased protein level of a marker in a sample, as compared to the protein level of the marker in a normal, control sample.

[0049] The term “altered activity” of a marker refers to an activity of a marker which is increased or decreased in a disease state, e.g., in a biological sample, as compared to the activity of the marker in a normal, control sample. Altered activity of a marker may be the result of, for example, altered expression of the marker, altered protein level of the marker, altered structure of the marker, or, e.g., an altered interaction with other proteins involved in the same or different pathway as the marker, or altered interaction with transcriptional activators or inhibitors.

[0050] The term “altered structure” of a marker refers to the presence of mutations or allelic variants within the marker gene or maker protein, e.g., mutations which affect expression or activity of the marker, as compared to the normal or wild-type gene or protein. For example, mutations include, but are not limited to substitutions, deletions, or addition mutations. Mutations may be present in the coding or non-coding region of the marker.

[0051] Unless otherwise specified here within, the terms “antibody” and “antibodies” broadly encompass naturally-occurring forms of antibodies (e.g. IgG, IgA, IgM, IgE) and recombinant antibodies such as single-chain antibodies, chimeric and humanized antibodies and multi-specific antibodies, as well as fragments and derivatives of all of the foregoing, which fragments and derivatives have at least an antigenic binding site. Antibody derivatives may comprise a protein or chemical moiety conjugated to an antibody. An “antibody” refers to a glycoprotein comprising at least two heavy (H) chains and two light (L) chains inter-connected by disulfide bonds, or an antigen binding portion thereof. Each heavy chain is comprised of a heavy chain variable region (abbreviated herein as V_{H}) and a heavy chain constant region. The heavy chain constant region is comprised of three domains, CH1, CH2 and CH3. Each light chain is comprised of a light chain variable region (abbreviated herein as V_{L}) and a light chain constant region. The light chain constant region is comprised of one domain, CL. The V_{H} and V_{L} regions may be further subdivided into regions of hypervariability, termed complementarity determining regions (CDR), interspersed with regions that are more conserved, termed framework regions (FR). Each V_{H} and V_{L} is composed of three CDRs and four FRs, arranged from amino-terminus to carboxyl-terminus in the following order: FR1, CDR1, FR2, CDR2, FR3, CDR3, FR4. The variable regions of the heavy and light chains contain a binding domain that interacts with an antigen. “Inactivating antibodies” refers to antibodies that do not induce the complement system.

[0052] The term “antibody” as used herein also includes an “antigen-binding portion” of an antibody (or simply “antibody portion”). The term “antigen-binding portion”, as used herein, refers to one or more fragments of an antibody that retain the ability to specifically bind to an antigen. It has been shown that the antigen-binding function of an antibody may be performed by fragments of a full-length antibody. Examples of binding fragments encompassed within the term “antigen-binding portion” of an antibody include (i) a Fab fragment, a monovalent fragment consisting of the VL, VH, CL and CH1 domains; (ii) a F(ab′)2 fragment, a bivalent fragment comprising two Fab fragments linked by a disulfide bridge at the hinge region; (iii) a Fd fragment consisting of the VH and CH1 domains; (iv) a Fv fragment consisting of the VL and VH domains of a single arm of an antibody, (v) a dAb fragment (Ward et al., (1989) Nature 341:544-546), which consists of a VH domain; and (vi) an isolated complementarity determining region (CDR). Furthermore, although the two domains of the Fv fragment, VL and VH, are coded for by separate genes, they may be joined, using recombinant methods, by a synthetic linker that enables them to be made as a single protein chain in which the VL and VH regions pair to form monovalent polypeptides (known as single chain Fv (scFv); see e.g., Bird et al. (1988) Science 242:423-426; and Huston et al. (1988) Proc. Natl. Acad. Sci. USA 85:5879-5883; and Osbourn et al. 1998, Nature Biotechnology 16: 778). Such single chain antibodies are also intended to be encompassed within the term “antigen-binding portion” of an antibody. Any VH and VL sequences of specific scFv may be linked to human immunoglobulin constant region cDNA or genomic sequences, in order to generate expression vectors encoding complete IgG polypeptides or other isotypes. VH and VL may also be used in the generation of Fab , Fv or other fragments of immunoglobulins using either protein chemistry or recombinant DNA technology. Other forms of single chain antibodies, such as diabodies are also encompassed. Diabodies are bivalent, bispecific antibodies in which VH and VL domains are expressed on a single polypeptide chain, but using a linker that is too short to allow for pairing between the two domains on the same chain, thereby forcing the domains to pair with complementary domains of another chain and creating two antigen binding sites (see e.g., Holliger, P., et al. (1993) Proc. Natl. Acad. Sci. USA 90:6444-6448; Poljak, R. J., et al. (1994) Structure 2:1121-1123).

[0053] Still further, an antibody or antigen-binding portion thereof may be part of larger immunoadhesion polypeptides, formed by covalent or noncovalent association of the antibody or antibody portion with one or more other proteins or peptides. Examples of such immunoadhesion polypeptides include use of the streptavidin core region to make a tetrameric scFv polypeptide (Kipriyanov, S.M., et al. (1995) Human Antibodies and Hybridomas 6:93-101) and use of a cysteine residue, a marker peptide and a C-terminal polyhistidine tag to make bivalent and biotinylated scFv polypeptides (Kipriyanov, S.M., et al. (1994) Mol. Immunol. 31:1047-1058). Antibody portions, such as Fab and F(ab′)2 fragments, may be prepared from whole antibodies using conventional techniques, such as papain or pepsin digestion, respectively, of whole antibodies. Moreover, antibodies, antibody portions and immunoadhesion polypeptides may be obtained using standard recombinant DNA techniques, as described herein.

[0054] Antibodies may be polyclonal or monoclonal; xenogeneic, allogeneic, or syngeneic; or modified forms thereof (e.g., humanized, chimeric, etc.). Antibodies may also be fully human. The terms “monoclonal antibodies” and “monoclonal antibody composition”, as used herein, refer to a population of antibody polypeptides that contain only one species of an antigen binding site capable of immunoreacting with a particular epitope of an antigen, whereas the term “polyclonal antibodies” and “polyclonal antibody composition” refer to a population of antibody polypeptides that contain multiple species of antigen binding sites capable of interacting with a particular antigen. A monoclonal antibody composition typically displays a single binding affinity for a particular antigen with which it immunoreacts.

[0055] The term “body fluid” refers to fluids that are excreted or secreted from the body as well as fluids that are normally not (e.g. amniotic fluid, aqueous humor, bile, blood and blood plasma, cerebrospinal fluid, cerumen and earwax, cowper’s fluid or pre-ejaculatory fluid, chyle, chyme, stool, female ejaculate, interstitial fluid, intracellular fluid, lymph, menses, breast milk, mucus, pleural fluid, pus, saliva, sebum, semen, serum, sweat, synovial fluid, tears, urine, vaginal lubrication, vitreous humor, vomit).

[0056] The terms “cancer” or “tumor” or “hyperproliferative disorder” refer to the presence of cells possessing characteristics typical of cancer-causing cells, such as uncontrolled proliferation, immortality, metastatic potential, rapid growth and proliferation rate, and certain characteristic morphological features. Cancer cells are often in the form of a tumor, but such cells may exist alone within an animal, or may be a non-tumorigenic cancer cell, such as a leukemia cell. Cancers include, but are not limited to, B cell cancer, e.g., multiple myeloma, Waldenstrom’s macroglobulinemia, the heavy chain diseases, such as, for example, alpha chain disease, gamma chain disease, and mu chain disease, benign monoclonal gammopathy, and immunocytic amyloidosis, melanomas, breast cancer, lung cancer, bronchus cancer, colorectal cancer, prostate cancer, pancreatic cancer, stomach cancer, ovarian cancer, urinary bladder cancer, brain or central nervous system cancer, peripheral nervous system cancer, esophageal cancer, cervical cancer, uterine or endometrial cancer, cancer of the oral cavity or pharynx, liver cancer, kidney cancer, testicular cancer, biliary tract cancer, small bowel or appendix cancer, salivary gland cancer, thyroid gland cancer, adrenal gland cancer, osteosarcoma, chondrosarcoma, cancer of hematologic tissues, and the like. Other non-limiting examples of types of cancers applicable to the methods encompassed by the present invention include human sarcomas and carcinomas, e.g., fibrosarcoma, myxosarcoma, liposarcoma, chondrosarcoma, osteogenic sarcoma, chordoma, angiosarcoma, endotheliosarcoma, lymphangiosarcoma, lymphangioendotheliosarcoma, synovioma, mesothelioma, Ewing’s tumor, leiomyosarcoma, rhabdomyosarcoma, colon carcinoma, colorectal cancer, pancreatic cancer, breast cancer, ovarian cancer, prostate cancer, squamous cell carcinoma, basal cell carcinoma, adenocarcinoma, sweat gland carcinoma, sebaceous gland carcinoma, papillary carcinoma, papillary adenocarcinomas, cystadenocarcinoma, medullary carcinoma, bronchogenic carcinoma, renal cell carcinoma, hepatoma, bile duct carcinoma, liver cancer, choriocarcinoma, seminoma, embryonal carcinoma, Wilms’ tumor, cervical cancer, bone cancer, brain tumor, testicular cancer, lung carcinoma, small cell lung carcinoma, bladder carcinoma, epithelial carcinoma, glioma, astrocytoma, medulloblastoma, craniopharyngioma, ependymoma, pinealoma, hemangioblastoma, acoustic neuroma, oligodendroglioma, meningioma, melanoma, neuroblastoma, retinoblastoma; leukemias, e.g., acute lymphocytic leukemia and acute myelocytic leukemia (myeloblastic, promyelocytic, myelomonocytic, monocytic and erythroleukemia); chronic leukemia (chronic myelocytic (granulocytic) leukemia and chronic lymphocytic leukemia); and polycythemia vera, lymphoma (Hodgkin’s disease and non-Hodgkin’s disease), multiple myeloma, Waldenstrom’s macroglobulinemia, and heavy chain disease. In some embodiments, cancers are epithlelial in nature and include but are not limited to, bladder cancer, breast cancer, cervical cancer, colon cancer, gynecologic cancers, renal cancer, laryngeal cancer, lung cancer, oral cancer, head and neck cancer, ovarian cancer, pancreatic cancer, prostate cancer, or skin cancer. In other embodiments, the cancer is breast cancer, prostate cancer, lung cancer, or colon cancer. In still other embodiments, the epithelial cancer is non-small-cell lung cancer, nonpapillary renal cell carcinoma, cervical carcinoma, ovarian carcinoma (e.g., serous ovarian carcinoma), or breast carcinoma. The epithelial cancers may be characterized in various other ways including, but not limited to, serous, endometrioid, mucinous, clear cell, Brenner, or undifferentiated.

[0057] The terms “CDR”, and its plural “CDRs”, refer to a complementarity determining region (CDR) of which three make up the binding character of a light chain variable region (CDR-L1, CDR-L2 and CDR-L3) and three make up the binding character of a heavy chain variable region (CDR-H1, CDR-H2 and CDR-H3). CDRs contribute to the functional activity of an antibody molecule and are separated by amino acid sequences that comprise scaffolding or framework regions. The exact definitional CDR boundaries and lengths are subject to different classification and numbering systems. CDRs may therefore be referred to by Kabat, Chothia, contact or any other boundary definitions. Despite differing boundaries, each of these systems has some degree of overlap in what constitutes the so called “hypervariable regions” within the variable sequences. CDR definitions according to these systems may therefore differ in length and boundary areas with respect to the adjacent framework region. See for example Kabat, Chothia, and/or MacCallum et al., (Kabat et al., in “Sequences of Proteins of Immunological Interest,” 5^{th} Edition, U.S. Department of Health and Human Services, 1992; Chothia et al. (1987) J. Mol. Biol. 196, 901; and MacCallum et al., J. Mol. Biol. (1996) 262, 732, each of which is incorporated by reference in its entirety).

[0058] As used herein, the term “classifying” includes “to associate” or “to categorize” a sample with a disease state. In certain instances, “classifying” is based on statistical evidence, empirical evidence, or both. In certain embodiments, the methods and systems of classifying use of a so-called training set of samples having known disease states. Once established, the training data set serves as a basis, model, or template against which the features of an unknown sample are compared, in order to classify the unknown disease state of the sample. In certain instances, classifying the sample is akin to diagnosing the disease state of the sample. In certain other instances, classifying the sample is akin to differentiating the disease state of the sample from another disease state.

[0059] As used herein, the term “coding region” refers to regions of a nucleotide sequence comprising codons which are translated into amino acid residues, whereas the term “noncoding region” refers to regions of a nucleotide sequence that are not translated into amino acids (e.g., 5′ and 3′ untranslated regions).

[0060] “Complement [to]” or “complementary” refers to the broad concept of sequence complementarity between regions of two nucleic acid strands or between two regions of the same nucleic acid strand. It is known that an adenine residue of a first nucleic acid region is capable of forming specific hydrogen bonds (“base pairing”) with a residue of a second nucleic acid region which is antiparallel to the first region if the residue is thymine or uracil. Similarly, it is known that a cytosine residue of a first nucleic acid strand is capable of base pairing with a residue of a second nucleic acid strand which is antiparallel to the first strand if the residue is guanine. A first region of a nucleic acid is complementary to a second region of the same or a different nucleic acid if, when the two regions are arranged in an antiparallel fashion, at least one nucleotide residue of the first region is capable of base pairing with a residue of the second region. In one embodiment, the first region comprises a first portion and the second region comprises a second portion, whereby, when the first and second portions are arranged in an antiparallel fashion, at least about 50%, and preferably at least about 75%, at least about 90%, or at least about 95% of the nucleotide residues of the first portion are capable of base pairing with nucleotide residues in the second portion. In another embodiment, all nucleotide residues of the first portion are capable of base pairing with nucleotide residues in the second portion.

[0061] As used herein, the term “composite antibody” refers to an antibody which has variable regions comprising germline or non-germline immunoglobulin sequences from two or more unrelated variable regions. Additionally, the term “composite, human antibody” refers to an antibody which has constant regions derived from human germline or non-germline immunoglobulin sequences and variable regions comprising human germline or non-germline sequences from two or more unrelated human variable regions. A composite, human antibody is useful as an effective component in a therapeutic agent according to the present invention since the antigenicity of the composite, human antibody in the human body is lowered.

[0062] The term “control” refers to any reference standard suitable to provide a comparison to the expression products in the test sample. In one embodiment, the control comprises obtaining a “control sample” from which expression product levels are detected and compared to the expression product levels from the test sample. Such a control sample may comprise any suitable sample, including but not limited to a sample from a control cancer patient (may be stored sample or previous sample measurement) with a known outcome; normal tissue or cells isolated from a subject, such as a normal patient or the cancer patient, cultured primary cells/tissues isolated from a subject such as a normal subject or the cancer patient, adjacent normal cells/tissues obtained from the same organ or body location of the cancer patient, a tissue or cell sample isolated from a normal subject, or a primary cells/tissues obtained from a depository. In another preferred embodiment, the control may comprise a reference standard expression product level from any suitable source, including but not limited to housekeeping genes, an expression product level range from normal tissue (or other previously analyzed control sample), a previously determined expression product level range within a test sample from a group of patients, or a set of patients with a certain outcome (for example, survival for one, two, three, four years, etc.) or receiving a certain treatment (for example, standard of care cancer therapy). It will be understood by those of skill in the art that such control samples and reference standard expression product levels may be used in combination as controls in the methods of the present invention. In one embodiment, the control may comprise normal or non-cancerous cell/tissue sample. In another preferred embodiment, the control may comprise an expression level for a set of patients, such as a set of cancer patients, or for a set of cancer patients receiving a certain treatment, or for a set of patients with one outcome versus another outcome. In the former case, the specific expression product level of each patient may be assigned to a percentile level of expression, or expressed as either higher or lower than the mean or average of the reference standard expression level. In another preferred embodiment, the control may comprise normal cells, cells from patients treated with combination chemotherapy, and cells from patients having benign cancer. In another embodiment, the control may also comprise a measured value for example, average level of expression of a particular gene in a population compared to the level of expression of a housekeeping gene in the same population. Such a population may comprise normal subjects, cancer patients who have not undergone any treatment (i.e., treatment naive), cancer patients undergoing standard of care therapy, or patients having benign cancer. In another preferred embodiment, the control comprises a ratio transformation of expression product levels, including but not limited to determining a ratio of expression product levels of two genes in the test sample and comparing it to any suitable ratio of the same two genes in a reference standard; determining expression product levels of the two or more genes in the test sample and determining a difference in expression product levels in any suitable control; and determining expression product levels of the two or more genes in the test sample, normalizing their expression to expression of housekeeping genes in the test sample, and comparing to any suitable control. In particularly preferred embodiments, the control comprises a control sample which is of the same lineage and/or type as the test sample. In another embodiment, the control may comprise expression product levels grouped as percentiles within or based on a set of patient samples, such as all patients with cancer. In one embodiment a control expression product level is established wherein higher or lower levels of expression product relative to, for instance, a particular percentile, are used as the basis for predicting outcome. In another preferred embodiment, a control expression product level is established using expression product levels from cancer control patients with a known outcome, and the expression product levels from the test sample are compared to the control expression product level as the basis for predicting outcome. As demonstrated by the data below, the methods of the invention are not limited to use of a specific cut-point in comparing the level of expression product in the test sample to the control.

[0063] As used herein, the term “Fc region” is used to define a C-terminal region of an immunoglobulin heavy chain, including native-sequence Fc regions and variant Fc regions. Although the boundaries of the Fc region of an immunoglobulin heavy chain might vary, the human IgG heavy-chain Fc region is usually defined to stretch from an amino acid residue at position Cys226, or from Pro230, to the carboxyl-terminus thereof. Suitable native-sequence Fc regions for use in the antibodies of the present invention include human IgG1, IgG2 (IgG2A, IgG2B), IgG3 and IgG4.

[0064] As used herein, “Fc receptor” or “FcR” describes a receptor that binds to the Fc region of an antibody. The preferred FcR is a native sequence human FcR. Moreover, a preferred FcR is one which binds an IgG antibody (a gamma receptor) and includes receptors of the FcyRI, FcyRII, and FcyRIII subclasses, including allelic variants and alternatively spliced forms of these receptors, FcyRII receptors include FcyRIIA (an “activating receptor”) and FcyRIIB (an “inhibiting receptor”), which have similar amino acid sequences that differ primarily in the cytoplasmic domains thereof. Activating receptor FcyRIIA contains an immunoreceptor tyrosine-based activation motif (ITAM) in its cytoplasmic domain. Inhibiting receptor FcyRIIB contains an immunoreceptor tyrosine-based inhibition motif (ITIM) in its cytoplasmic domain (see M. Daëron, Annu. Rev. Immunol. 15:203-234 (1997). FcRs are reviewed in Ravetch and Kinet, Annu. Rev. Immunol. 9: 457-92 (1991); Capel et al., Immunomethods 4: 25-34 (1994); and de Haas et al., J. Lab. Clin. Med. 126: 330-41 (1995). Other FcRs, including those to be identified in the future, are encompassed by the term “FcR” herein.

[0065] A molecule is “fixed” or “affixed” to a substrate if it is covalently or non-covalently associated with the substrate such the substrate may be rinsed with a fluid (e.g. standard saline citrate, pH 7.4) without a substantial fraction of the molecule dissociating from the substrate.

[0066] As used herein, “Framework” or “FR” residues are those variable-domain residues other than the HVR residues as herein defined.

[0067] “Function-conservative variants” are those in which a given amino acid residue in a protein or enzyme has been changed without altering the overall conformation and function of the polypeptide, including, but not limited to, replacement of an amino acid with one having similar properties (such as, for example, polarity, hydrogen bonding potential, acidic, basic, hydrophobic, aromatic, and the like). Amino acids other than those indicated as conserved may differ in a protein so that the percent protein or amino acid sequence similarity between any two proteins of similar function may vary and may be, for example, from 70% to 99% as determined according to an alignment scheme such as by the Cluster Method, wherein similarity is based on the MEGALIGN algorithm. A “function-conservative variant” also includes a polypeptide which has at least 60% amino acid identity as determined by BLAST or FASTA algorithms, preferably at least 75%, more preferably at least 85%, still preferably at least 90%, and even more preferably at least 95%, and which has the same or substantially similar properties or functions as the native or parent protein to which it is compared.

[0068] As used herein, the term “heterologous antibody” is defined in relation to the transgenic non-human organism producing such an antibody. This term refers to an antibody having an amino acid sequence or an encoding nucleic acid sequence corresponding to that found in an organism not consisting of the transgenic non-human animal, and generally from a species other than that of the transgenic non-human animal.

[0069] “Homologous” as used herein, refers to nucleotide sequence similarity between two regions of the same nucleic acid strand or between regions of two different nucleic acid strands. When a nucleotide residue position in both regions is occupied by the same nucleotide residue, then the regions are homologous at that position. A first region is homologous to a second region if at least one nucleotide residue position of each region is occupied by the same residue. Homology between two regions is expressed in terms of the proportion of nucleotide residue positions of the two regions that are occupied by the same nucleotide residue. By way of example, a region having the nucleotide sequence 5′-ATTGCC-3′ and a region having the nucleotide sequence 5′-TATGGC-3′ share 50% homology. Preferably, the first region comprises a first portion and the second region comprises a second portion, whereby, at least about 50%, and preferably at least about 75%, at least about 90%, or at least about 95% of the nucleotide residue positions of each of the portions are occupied by the same nucleotide residue. More preferably, all nucleotide residue positions of each of the portions are occupied by the same nucleotide residue.

[0070] As used herein, the term “host cell” is intended to refer to a cell into which a nucleic acid of the present invention, such as a recombinant expression vector of the present invention, has been introduced. The terms “host cell” and “recombinant host cell” are used interchangeably herein. It should be understood that such terms refer not only to the particular subject cell but to the progeny or potential progeny of such a cell. Because certain modifications may occur in succeeding generations due to either mutation or environmental influences, such progeny may not, in fact, be identical to the parent cell, but are still included within the scope of the term as used herein.

[0071] The term “humanized antibody”, as used herein, is intended to include antibodies made by a non-human cell having variable and constant regions which have been altered to more closely resemble antibodies that would be made by a human cell. For example, by altering the non-human antibody amino acid sequence to incorporate amino acids found in human germline immunoglobulin sequences. Humanized antibodies may include amino acid residues not encoded by human germline immunoglobulin sequences (e.g., mutations introduced by random or site-specific mutagenesis in vitro or by somatic mutation in vivo), for example in the CDRs. The term “humanized antibody”, as used herein, also includes antibodies in which CDR sequences derived from the germline of another mammalian species, such as a mouse, have been grafted onto human framework sequences.

[0072] As used herein, the term “hypervariable region,” “HVR,” or “HV,” refers to the regions of an antibody-variable domain that are hypervariable in sequence and/or form structurally defined loops. Generally, antibodies comprise six HVRs; three in the VH (H1, H2, H3), and three in the VL (L1, L2, L3). In native antibodies, H3 and L3 display the most diversity of the six HVRs, and H3 in particular is believed to play a unique role in conferring fine specificity to antibodies. See, e.g., Xu et al. (2000) Immunity 13, 37-45; Johnson and Wu in Methods in Molecular Biology 248, 1-25 (Lo, ed., Human Press, Totowa, NJ, 2003)). Indeed, naturally occurring camelid antibodies consisting of a heavy chain only are functional and stable in the absence of light chain (see, e.g., Hamers-Casterman et al. (1993) Nature 363:446-448 (1993) and Sheriff et al. (1996) Nature Struct. Biol. 3, 733-736).

[0073] As used herein, the term “immune cell” refers to cells that play a role in the immune response. Immune cells are of hematopoietic origin, and include lymphocytes, such as B cells and T cells; natural killer cells; myeloid cells, such as monocytes, macrophages, eosinophils, mast cells, basophils, and granulocytes.

[0074] As used herein, the term “immune disorder” includes immune diseases, conditions, and predispositions to, including, but not limited to, cancer, chronic inflammatory disease and disorders (including, e.g., Crohn’s disease, inflammatory bowel disease, reactive arthritis, and Lyme disease), insulin-dependent diabetes, organ specific autoimmunity (including, e.g., multiple sclerosis, Hashimoto’s thyroiditis, autoimmune uveitis, and Grave’s disease), contact dermatitis, psoriasis, graft rejection, graft versus host disease, sarcoidosis, atopic conditions (including, e.g., asthma and allergy including, but not limited to, allergic rhinitis and gastrointestinal allergies such as food allergies), eosinophilia, conjunctivitis, glomerular nephritis, systemic lupus erythematosus, scleroderma, certain pathogen susceptibilities such as helminthic (including, e.g., leishmaniasis) and certain viral infections (including, e.g., HIV and bacterial infections such as tuberculosis and lepromatous leprosy) and malaria.

[0075] As used herein, the term “immune response” includes T cell mediated and/or B cell mediated immune responses. Exemplary immune responses include T cell responses, e.g., cytokine production, and cellular cytotoxicity. In addition, the term immune response includes immune responses that are indirectly effected by T cell activation, e.g., antibody production (humoral responses) and activation of cytokine responsive cells, e.g., macrophages.

[0076] As used herein, the term “inhibiting” and grammatical equivalents thereof refer decrease, limiting, and/or blocking a particular action, function, or interaction. In one embodiment, the term refers to reducing the level of a given output or parameter to a quantity (e.g., background staining, PD-1 signaling, PD-1 immunoinhibitory function, and the like) which is at least 10%, 15%, 20%, 25%, 30%, 35%, 40%, 45%, 50%, 55%, 60%, 65%, 70%, 75%, 80%, 85%, 90%, 95%, 99% or less than the quantity in a corresponding control. A reduced level of a given output or parameter need not, although it may, mean an absolute absence of the output or parameter. The invention does not require, and is not limited to, methods that wholly eliminate the output or parameter. The given output or parameter may be determined using methods well known in the art, including, without limitation, immunohistochemical, molecular biological, cell biological, clinical, and biochemical assays, as discussed herein and in the examples. The opposite terms “promoting,” “increasing,” and grammatical equivalents thereof refer to the increase in the level of a given output or parameter that is the reverse of that described for inhibition or decrease.

[0077] As used herein, the term “interaction”, when referring to an interaction between two molecules, refers to the physical contact (e.g., binding) of the molecules with one another. Generally, such an interaction results in an activity (which produces a biological effect) of one or both of said molecules. The activity may be a direct activity of one or both of the molecules, (e.g., signal transduction). Alternatively, one or both molecules in the interaction may be prevented from binding their ligand, and thus be held inactive with respect to ligand binding activity (e.g., binding its ligand and triggering or inhibiting an immune response). To inhibit such an interaction results in the disruption of the activity of one or more molecules involved in the interaction. To enhance such an interaction is to prolong or increase the likelihood of said physical contact, and prolong or increase the likelihood of said activity.

[0078] As used herein, the term an “isolated antibody” is intended to refer to an antibody which is substantially free of other antibodies having different antigenic specificities (e.g., an isolated antibody that specifically binds to human PD-1 and is substantially free of antibodies that do not bind to the PD-1). An isolated antibody that specifically binds to human PD-1 may, however, have cross-reactivity to other PD-1 proteins, respectively, from different species. For example, in some embodiments, the antibody maintains specific binding affinity for at least two species, such as human and mouse, or other mammal or non-mammal species. However, in some embodiments, the antibody maintains higher or indeed specific affinity and selectivity for human PD-1. In addition, an isolated antibody is typically substantially free of other cellular material and/or chemicals. In one embodiment of the present invention, a combination of “isolated” monoclonal antibodies having different specificities to human PD-1 are combined in a well-defined composition.

[0079] As used herein, an “isolated protein” refers to a protein that is substantially free of other proteins, cellular material, separation medium, and culture medium when isolated from cells or produced by recombinant DNA techniques, or chemical precursors or other chemicals when chemically synthesized. An “isolated” or “purified” protein or biologically active portion thereof is substantially free of cellular material or other contaminating proteins from the cell or tissue source from which the antibody, polypeptide, peptide or fusion protein is derived, or substantially free from chemical precursors or other chemicals when chemically synthesized. The language “substantially free of cellular material” includes preparations of a target polypeptide (e.g., immunoglobulin) or fragment thereof, in which the protein is separated from cellular components of the cells from which it is isolated or recombinantly produced. In one embodiment, the language “substantially free of cellular material” includes preparations of target protein or fragment thereof, having less than about 30% (by dry weight) of non-target protein (also referred to herein as a “contaminating protein”), more preferably less than about 20% of non-target protein, still more preferably less than about 10% of non-target protein, and most preferably less than about 5% non-target protein. When antibody, polypeptide, peptide or fusion protein or fragment thereof, e.g., a biologically active fragment thereof, is recombinantly produced, it is also preferably substantially free of culture medium, i.e., culture medium represents less than about 20%, more preferably less than about 10%, and most preferably less than about 5% of the volume of the protein preparation.

[0080] As used herein, the term “isotype” refers to the antibody class (e.g., IgM or IgG1) that is encoded by heavy chain constant region genes.

[0081] As used herein, the term “K_{D}” is intended to refer to the dissociation equilibrium constant of a particular antibody-antigen interaction. The binding affinity of antibodies of the disclosed invention may be measured or determined by standard antibody-antigen assays, for example, competitive assays, saturation assays, or standard immunoassays such as ELISA or RIA.

[0082] As used herein, a “kit” is any manufacture (e.g. a package or container) comprising at least one reagent, e.g. a probe, for specifically detecting or modulating the expression of a marker of the present invention. The kit may be promoted, distributed, or sold as a unit for performing the methods of the present invention.

[0083] As used herein, the term “monoclonal antibody”, refers to an antibody which displays a single binding specificity and affinity for a particular epitope. Accordingly, the term “human monoclonal antibody” refers to an antibody which displays a single binding specificity and which has variable and constant regions derived from human germline or non-germline immunoglobulin sequences. In one embodiment, human monoclonal antibodies are produced by a hybridoma which includes a B cell obtained from a transgenic non-human animal, e.g., a transgenic mouse, having a genome comprising a human heavy chain transgene and a light chain transgene fused to an immortalized cell.

[0084] A “marker” is a gene whose altered level of expression in a tissue or cell from its expression level in normal or healthy tissue or cell is associated with a disease state, such as cancer. A “marker nucleic acid” is a nucleic acid (e.g., mRNA, cDNA) encoded by or corresponding to a marker of the present invention. Such marker nucleic acids include DNA (e.g., cDNA) comprising the entire or a partial sequence of any of the nucleic acid sequences set forth in the Sequence Listing or the complement of such a sequence. The marker nucleic acids also include RNA comprising the entire or a partial sequence of any of the nucleic acid sequences set forth in the Sequence Listing or the complement of such a sequence, wherein all thymidine residues are replaced with uridine residues. A “marker protein” is a protein encoded by or corresponding to a marker of the present invention. A marker protein comprises the entire or a partial sequence of any of the sequences set forth in the Sequence Listing. In some embodiments, PD-1 is used as a marker. The terms “protein” and “polypeptide” are used interchangeably.

[0085] As used herein, the term “modulate” includes up-regulation and down-regulation, e.g., enhancing or inhibiting a response.

[0086] The “normal” level of expression of a marker is the level of expression of the marker in cells of a subject, e.g., a human patient, not afflicted with a disease or disorder related to aberrant marker levels. An “over-expression” or “significantly higher level of expression” of a marker refers to an expression level in a test sample that is greater than the standard error of the assay employed to assess expression, and is preferably at least twice, and more preferably three, four, five or ten times the expression level of the marker in a control sample (e.g., sample from a healthy subjects not having the marker associated disease) and preferably, the average expression level of the marker in several control samples. A “significantly lower level of expression” of a marker refers to an expression level in a test sample that is at least twice, and more preferably three, four, five or ten times lower than the expression level of the marker in a control sample (e.g., sample from a healthy subject not having the marker associated disease) and preferably, the average expression level of the marker in several control samples.

[0087] As used herein, the term “nucleic acid molecule” is intended to include DNA molecules and RNA molecules. A nucleic acid molecule may be single-stranded or double-stranded, but preferably is double-stranded DNA. As used herein, the term “isolated nucleic acid molecule” in reference to nucleic acids encoding antibodies or antibody portions (e.g., V_{H}, V_{L}, CDR3) that bind to PD-1, is intended to refer to a nucleic acid molecule in which the nucleotide sequences encoding the antibody or antibody portion are free of other nucleotide sequences encoding antibodies or antibody portions that bind antigens other than PD-1, which other sequences may naturally flank the nucleic acid in human genomic DNA.

[0088] A nucleic acid is “operably linked” when it is placed into a functional relationship with another nucleic acid sequence. For instance, a promoter or enhancer is operably linked to a coding sequence if it affects the transcription of the sequence. With respect to transcription regulatory sequences, operably linked means that the DNA sequences being linked are contiguous and, where necessary to join two protein coding regions, contiguous and in reading frame. For switch sequences, operably linked indicates that the sequences are capable of effecting switch recombination.

[0089] An “over-expression” or “significantly higher level of expression” of a marker refers to an expression level in a test sample that is greater than the standard error of the assay employed to assess expression, and is preferably at least twice, and more preferably 2.1, 2.2, 2.3, 2.4, 2.5, 2.6, 2.7, 2.8, 2.9, 3, 3.5, 4, 4.5, 5, 5.5, 6, 6.5, 7, 7.5, 8, 8.5, 9, 9.5, 10, 10.5, 11, 12, 13, 14, 15, 16, 17, 18, 19, 20 times or more higher than the expression activity or level of the marker in a control sample (e.g., sample from a healthy subject not having the marker associated disease) and preferably, the average expression level of the marker in several control samples. A “significantly lower level of expression” of a marker refers to an expression level in a test sample that is at least twice, and more preferably 2.1, 2.2, 2.3, 2.4, 2.5, 2.6, 2.7, 2.8, 2.9, 3, 3.5, 4, 4.5, 5, 5.5, 6, 6.5, 7, 7.5, 8, 8.5, 9, 9.5, 10, 10.5, 11, 12, 13, 14, 15, 16, 17, 18, 19, 20 times or more lower than the expression level of the marker in a control sample (e.g., sample from a healthy subject not having the marker associated disease) and preferably, the average expression level of the marker in several control samples.

[0090] The samples may be collected from individuals repeatedly over a longitudinal period of time (e.g., once or more on the order of days, weeks, months, annually, biannually, etc.). Obtaining numerous samples from an individual over a period of time may be used to verify results from earlier detections and/or to identify an alteration in biological pattern as a result of, for example, disease progression, drug treatment, etc. For example, subject samples may be taken and monitored every month, every two months, or combinations of one, two, or three month intervals according to the present invention. In addition, the biomarker amount and/or activity measurements of the subject obtained over time may be conveniently compared with each other, as well as with those of normal controls during the monitoring period, thereby providing the subject’s own values, as an internal, or personal, control for long-term monitoring.

[0091] Samples may contain live cells/tissue, fresh frozen cells, fresh tissue, biopsies, fixed cells/tissue, cells/tissue embedded in a medium, such as paraffin, histological slides, or any combination thereof.

[0092] Sample preparation and separation may involve any of the procedures, depending on the type of sample collected and/or analysis of biomarker measurement(s). Such procedures include, by way of example only, concentration, dilution, adjustment of pH, removal of high abundance polypeptides (e.g., albumin, gamma globulin, and transferrin, etc.), addition of preservatives and calibrants, addition of protease inhibitors, addition of denaturants, desalting of samples, concentration of sample proteins, extraction and purification of lipids.

[0093] The sample preparation may also isolate molecules that are bound in non-covalent complexes to other protein (e.g., carrier proteins). This process may isolate those molecules bound to a specific carrier protein (e.g., albumin), or use a more general process, such as the release of bound molecules from all carrier proteins via protein denaturation, for example using an acid, followed by removal of the carrier proteins.

[0094] Removal of undesired proteins (e.g., high abundance, uninformative, or undetectable proteins) from a sample may be achieved using high affinity reagents, high molecular weight filters, ultracentrifugation and/or electrodialysis. High affinity reagents include antibodies or other reagents (e.g., aptamers) that selectively bind to high abundance proteins. Sample preparation could also include ion exchange chromatography, metal ion affinity chromatography, gel filtration, hydrophobic chromatography, chromatofocusing, adsorption chromatography, isoelectric focusing and related techniques. Molecular weight filters include membranes that separate molecules on the basis of size and molecular weight. Such filters may further employ reverse osmosis, nanofiltration, ultrafiltration and microfiltration.

[0095] The terms “polypeptide fragment” or “fragment”, when used in reference to a reference polypeptide, refers to a polypeptide in which amino acid residues are deleted as compared to the reference polypeptide itself, but where the remaining amino acid sequence is usually identical to the corresponding positions in the reference polypeptide. Such deletions may occur at the amino-terminus, internally, or at the carboxyl-terminus of the reference polypeptide, or alternatively both. Fragments typically are at least 5, 6, 8 or 10 amino acids long, at least 14 amino acids long, at least 20, 30, 40 or 50 amino acids long, at least 75 amino acids long, or at least 100, 150, 200, 300, 500 or more amino acids long. They may be, for example, at least and/or including 10, 15, 20, 25, 30, 35, 40, 45, 50, 55, 60, 65, 70, 75, 80, 85, 90, 95, 100, 120, 140, 160, 180, 200, 220, 240, 260, 280, 300, 320, 340, 360, 380, 400, 420, 440, 460, 480, 500, 520, 540, 560, 580, 600, 620, 640, 660, 680, 700, 720, 740, 760, 780, 800, 820, 840, 860, 880, 900, 920, 940, 960, 980, 1000, 1020, 1040, 1060, 1080, 1100, 1120, 1140, 1160, 1180, 1200, 1220, 1240, 1260, 1280, 1300, 1320, 1340 or more long so long as they are less than the length of the full-length polypeptide. Alternatively, they may be no longer than and/or excluding such a range so long as they are less than the length of the full-length polypeptide.

[0096] The term “probe” refers to any molecule which is capable of selectively binding to a specifically intended target molecule, for example, a nucleotide transcript or protein encoded by or corresponding to a marker. Probes may be either synthesized by one skilled in the art, or derived from appropriate biological preparations. For purposes of detection of the target molecule, probes may be specifically designed to be labeled, as described herein. Examples of molecules that may be utilized as probes include, but are not limited to, RNA, DNA, proteins, antibodies, and organic molecules.

[0097] As used herein, the term “rearranged” refers to a configuration of a heavy chain or light chain immunoglobulin locus wherein a V segment is positioned immediately adjacent to a D-J or J segment in a conformation encoding essentially a complete V_{H} and V_{L} domain, respectively. A rearranged immunoglobulin gene locus may be identified by comparison to germline DNA; a rearranged locus will have at least one recombined heptamer/nonamer homology element.

[0098] As used herein, the term “recombinant host cell” (or simply “host cell”), is intended to refer to a cell into which a recombinant expression vector has been introduced. It should be understood that such terms are intended to refer not only to the particular subject cell but to the progeny of such a cell. Because certain modifications may occur in succeeding generations due to either mutation or environmental influences, such progeny may not, in fact, be identical to the parent cell, but are still included within the scope of the term “host cell” as used herein.

[0099] As used herein, the term “recombinant human antibody” includes all human antibodies that are prepared, expressed, created or isolated by recombinant means, such as (a) antibodies isolated from an animal (e.g., a mouse) that is transgenic or transchromosomal for human immunoglobulin genes or a hybridoma prepared therefrom (described further below), (b) antibodies isolated from a host cell transformed to express the antibody, e.g., from a transfectoma, (c) antibodies isolated from a recombinant, combinatorial human antibody library, and (d) antibodies prepared, expressed, created or isolated by any other means that involve splicing of human immunoglobulin gene sequences to other DNA sequences. Such recombinant human antibodies have variable and constant regions derived from human germline and/or non-germline immunoglobulin sequences. In certain embodiments, however, such recombinant human antibodies may be subjected to in vitro mutagenesis (or, when an animal transgenic for human Ig sequences is used, in vivo somatic mutagenesis) and thus the amino acid sequences of the V_{H} and V_{L} regions of the recombinant antibodies are sequences that, while derived from and related to human germline V_{H} and V_{L} sequences, may not naturally exist within the human antibody germline repertoire in vivo.

[0100] The present invention “response” is generally related to for example, determining the effects on progression, efficacy, or outcome of a clinical intervention. In some embodiments, responses relate directly to a change in tumor mass and/or volume after initiation of clinical intervention. For example, hyperproliferative disorder responses may be assessed according to the size of a tumor after systemic intervention compared to the initial size and dimensions as measured by CT, PET, mammogram, ultrasound or palpation. Response may also be assessed by caliper measurement or pathological examination of the tumor after biopsy or surgical resection. Response may be recorded in a quantitative fashion like percentage change in tumor volume or in a qualitative fashion like “pathological complete response” (pCR), “clinical complete remission” (cCR), “clinical partial remission” (cPR), “clinical stable disease” (cSD), “clinical progressive disease” (cPD) or other qualitative criteria. Assessment may be done early after the onset of the clinical intervention, e.g., after a few hours, days, weeks or preferably after a few months. A typical endpoint for response assessment is upon termination of the clinical intervention or upon surgical removal of residual tumor cells and/or the tumor bed.

[0101] As used herein, the term “specific binding” refers to antibody binding to a predetermined antigen. Typically, the antibody binds with an affinity (K_{D}) of approximately less than 10⁻⁷ M, such as approximately less than 10⁻⁸ M, 10⁻⁹ M or 10⁻¹⁰ M or even lower when determined by surface plasmon resonance (SPR) technology in a BIACORE® assay instrument using human PD-1 as the analyte and the antibody as the ligand, and binds to the predetermined antigen with an affinity that is at least 1.1-, 1.2-, 1.3-, 1.4-, 1.5-, 1.6-, 1.7-, 1.8-, 1.9-, 2.0-, 2.5-, 3.0-, 3.5-, 4.0-, 4.5-, 5.0-, 6.0-, 7.0-, 8.0-, 9.0-, or 10.0-fold or greater than its affinity for binding to a non-specific antigen (e.g., BSA, casein) other than the predetermined antigen or a closely-related antigen. The phrases “an antibody recognizing an antigen” and “an antibody specific for an antigen” are used interchangeably herein with the term “an antibody which binds specifically to an antigen.”

[0102] As used herein, “subject” refers to any healthy animal, mammal or human, or any animal, mammal or human afflicted with a disease or disorder related to aberrant marker levels. The term “subject” is interchangeable with “patient”. The term “non-human animal” includes all vertebrates, e.g., mammals and non-mammals, such as non-human primates, sheep, dog, cow, chickens, amphibians, reptiles, etc.

[0103] The language “substantially free of chemical precursors or other chemicals” includes preparations of antibody, polypeptide, peptide or fusion protein in which the protein is separated from chemical precursors or other chemicals which are involved in the synthesis of the protein. In one embodiment, the language “substantially free of chemical precursors or other chemicals” includes preparations of antibody, polypeptide, peptide or fusion protein having less than about 30% (by dry weight) of chemical precursors or non-antibody, polypeptide, peptide or fusion protein chemicals, more preferably less than about 20% chemical precursors or non-antibody, polypeptide, peptide or fusion protein chemicals, still more preferably less than about 10% chemical precursors or non-antibody, polypeptide, peptide or fusion protein chemicals, and most preferably less than about 5% chemical precursors or non- antibody, polypeptide, peptide or fusion protein chemicals.

[0104] As used herein, the term “survival” includes all of the following: survival until mortality, also known as overall survival (wherein said mortality may be either irrespective of cause or tumor related); “recurrence-free survival” (wherein the term recurrence shall include both localized and distant recurrence); metastasis free survival; disease free survival (wherein the term disease shall include cancer and diseases associated therewith). The length of said survival may be calculated by reference to a defined start point (e.g. time of diagnosis or start of treatment) and end point (e.g. death, recurrence or metastasis). In addition, criteria for efficacy of treatment may be expanded to include response to chemotherapy, probability of survival, probability of metastasis within a given time period, and probability of tumor recurrence.

[0105] A “transcribed polynucleotide” or “nucleotide transcript” is a polynucleotide (e.g. an mRNA, hnRNA, a cDNA, or an analog of such RNA or cDNA) which is complementary to or homologous with all or a portion of a mature mRNA made by transcription of a marker of the present invention and normal post-transcriptional processing (e.g. splicing), if any, of the RNA transcript, and reverse transcription of the RNA transcript.

[0106] As used herein, the term “T cell” includes CD4+ T cells and CD8+ T cells. The term T cell also includes both T helper 1 type T cells and T helper 2 type T cells. The term “antigen presenting cell” includes professional antigen presenting cells (e.g., B lymphocytes, monocytes, dendritic cells, Langerhans cells) as well as other antigen presenting cells (e.g., keratinocytes, endothelial cells, astrocytes, fibroblasts, oligodendrocytes).

[0107] As used herein, the term “unrearranged” or “germline configuration” in reference to a V segment refers to the configuration wherein the V segment is not recombined so as to be immediately adjacent to a D or J segment.

[0108] As used herein, the term “vector” refers to a nucleic acid capable of transporting another nucleic acid to which it has been linked. One type of vector is a “plasmid”, which refers to a circular double stranded DNA loop into which additional DNA segments may be ligated. Another type of vector is a viral vector, wherein additional DNA segments may be ligated into the viral genome. Certain vectors are capable of autonomous replication in a host cell into which they are introduced (e.g., bacterial vectors having a bacterial origin of replication and episomal mammalian vectors). Other vectors (e.g., non-episomal mammalian vectors) are integrated into the genome of a host cell upon introduction into the host cell, and thereby are replicated along with the host genome. Moreover, certain vectors are capable of directing the expression of genes to which they are operatively linked. Such vectors are referred to herein as “recombinant expression vectors” or simply “expression vectors”. In general, expression vectors of utility in recombinant DNA techniques are often in the form of plasmids. In the present specification, “plasmid” and “vector” may be used interchangeably as the plasmid is the most commonly used form of vector. However, the invention is intended to include such other forms of expression vectors, such as viral vectors (e.g., replication defective retroviruses, adenoviruses and adeno-associated viruses), which serve equivalent functions.

[0109] For nucleic acids, the term “substantial homology” indicates that two nucleic acids, or designated sequences thereof, when optimally aligned and compared, are identical, with appropriate nucleotide insertions or deletions, in at least about 80% of the nucleotides, usually at least about 81%, 82%, 83%, 84%, 85%, 86%, 87%, 88%, 89%, 90%, 91%, 92%, 93%, 94%, 95%, 96%, or more of the nucleotides, and more preferably at least about 97%, 98%, 99% or more of the nucleotides. Alternatively, substantial homology exists when the segments will hybridize under selective hybridization conditions, to the complement of the strand.

[0110] The percent identity between two sequences is a function of the number of identical positions shared by the sequences (i.e., % identity= # of identical positions/total # of positions × 100), taking into account the number of gaps, and the length of each gap, which need to be introduced for optimal alignment of the two sequences. The comparison of sequences and determination of percent identity between two sequences may be accomplished using a mathematical algorithm, as described in the non-limiting examples below.

[0111] The percent identity between two nucleotide sequences may be determined using the GAP program in the GCG software package (available on the world wide web at the GCG company website), using a NWSgapdna. CMP matrix and a gap weight of 40, 50, 60, 70, or 80 and a length weight of 1, 2, 3, 4, 5, or 6. The percent identity between two nucleotide or amino acid sequences may also be determined using the algorithm of E. Meyers and W. Miller (CABIOS, 4:11 17 (1989)) which has been incorporated into the ALIGN program (version 2.0), using a PAM120 weight residue table, a gap length penalty of 12 and a gap penalty of 4. In addition, the percent identity between two amino acid sequences may be determined using the Needleman and Wunsch (J. Mol. Biol. (48):444 453 (1970)) algorithm which has been incorporated into the GAP program in the GCG software package (available on the world wide web at the GCG company website), using either a Blosum 62 matrix or a PAM250 matrix, and a gap weight of 16, 14, 12, 10, 8, 6, or 4 and a length weight of 1, 2, 3, 4, 5, or 6.

[0112] The nucleic acid and protein sequences of the present invention may further be used as a “query sequence” to perform a search against public databases to, for example, identify related sequences. Such searches may be performed using the NBLAST and XBLAST programs (version 2.0) of Altschul, et al. (1990) J. Mol. Biol. 215:403 10. BLAST nucleotide searches may be performed with the NBLAST program, score=100, wordlength=12 to obtain nucleotide sequences homologous to the nucleic acid molecules of the present invention. BLAST protein searches may be performed with the XBLAST program, score=50, wordlength=3 to obtain amino acid sequences homologous to the protein molecules of the present invention. To obtain gapped alignments for comparison purposes, Gapped BLAST may be utilized as described in Altschul et al., (1997) Nucleic Acids Res. 25(17):3389 3402. When utilizing BLAST and Gapped BLAST programs, the default parameters of the respective programs (e.g., XBLAST and NBLAST) may be used (available on the world wide web at the NCBI website).

[0113] The nucleic acids may be present in whole cells, in a cell lysate, or in a partially purified or substantially pure form. A nucleic acid is “isolated” or “rendered substantially pure” when purified away from other cellular components or other contaminants, e.g., other cellular nucleic acids or proteins, by standard techniques, including alkaline/SDS treatment, CsCl banding, column chromatography, agarose gel electrophoresis and others well known in the art (see, F. Ausubel, et al., ed. Current Protocols in Molecular Biology, Greene Publishing and Wiley Interscience, New York (1987)).

### II. Monoclonal Antibodies, Immunoglobulins, and Polypeptides

[0114] The present invention relates, in part, to isolated bispecific molecules, which may include monoclonal antibodies or fragments thereof that are directed against PD-1 and against an antigen on the opposing surface of an adjacent cell.

[0115] The term “PD-1” refers to a member of the immunoglobulin gene superfamily that functions as a coinhibitory receptor having PD-L1 and PD-L2 as known ligands. PD-1 was previously identified using a subtraction cloning based approach to select for genes upregulated during TCR-induced activated T cell death. PD-1 is a member of the CD28/CTLA-4 family of molecules based on its ability to bind to PD-L1. Like CTLA-4, PD-1 is rapidly induced on the surface of T cells in response to anti-CD3 (Agata et al. 25 (1996) Int. Immunol. 8:765). In contrast to CTLA-4, however, PD-1 is also induced on the surface of B-cells (in response to anti-IgM). PD-1 is also expressed on a subset of thymocytes and myeloid cells (Agata et al. (1996) supra; Nishimura et al. (1996) Int. Immunol. 8:773).

[0116] The nucleic acid and amino acid sequences of a representative human PD-1 biomarker is available to the public at the GenBank database under NM_005018.2 and NP_005009.2 and is shown in Table 2 (see also Ishida et al. (1992) 20 EMBO J 11:3887; Shinohara et al. (1994) Genomics 23:704; U.S. Pat. 5,698,520). PD-1 has an extracellular region containing immunoglobulin superfamily domain, a transmembrane domain, and an intracellular region including an immunoreceptor tyrosine-based inhibitory motif (ITIM) (Ishida et al. (1992) EMBO J. 11:3887; Shinohara et al. (1994) Genomics 23:704; and U.S. Pat. 5,698,520) and an immunoreceptor tyrosine-based switch motif (ITSM). These features also define a larger family of polypeptides, called the immunoinhibitory receptors, which also includes gp49B, PIR-B, and the killer inhibitory receptors (KIRs) (Vivier and Daeron (1997) Immunol. Today 18:286). It is often assumed that the tyrosyl phosphorylated ITIM and ITSM motif of these receptors interacts with SH2-domain containing phosphatases, which leads to inhibitory signals. A subset of these immunoinhibitory receptors bind to MHC polypeptides, for example the KIRs, and CTLA4 binds to B7-1 and B7-2. It has been proposed that there is a phylogenetic relationship between the MHC and B7 genes (Henry et al. (1999) Immunol. Today 20(6):285-8). Nucleic acid and polypeptide sequences of PD-1 orthologs in organisms other than humans are well known and include, for example, mouse PD-1 (NM_008798.2 and NP_032824.1), rat PD-1 (NM_001106927.1 and NP_001100397.1), dog PD-1 (XM_543338.3 and XP_543338.3), cow PD-1 (NM_001083506.1 and NP_001076975.1), and chicken PD-1 (XM_422723.3 and XP_422723.2).

[0117] PD-1 polypeptides are inhibitory receptors capable of transmitting an inhibitory signal to an immune cell to thereby inhibit immune cell effector function, or are capable of promoting costimulation (e.g., by competitive inhibition) of immune cells, e.g., when present in soluble, monomeric form. Preferred PD-1 family members share sequence identity with PD-1 and bind to one or more B7 family members, e.g., B7-1, B7-2, PD-1 ligand, and/or other polypeptides on antigen presenting cells.

[0118] The term “PD-1 activity,” includes the ability of a PD-1 polypeptide to modulate an inhibitory signal in an activated immune cell, e.g., by engaging a natural PD-1 ligand on an antigen presenting cell. Modulation of an inhibitory signal in an immune cell results in modulation of proliferation of, and/or cytokine secretion by, an immune cell. Thus, the term “PD-1 activity” includes the ability of a PD-1 polypeptide to bind its natural ligand(s), the ability to modulate immune cell costimulatory or inhibitory signals, and the ability to modulate the immune response.

[0119] In some embodiments, a condition such as cancer is responsive to PD-1 blockade alone. In other embodiments, a condition such as cancer is responsive to PD-1 blockade alone, but is significantly or synergistically more responsive when treated with PD-1 blockade and another therapy in combination. Many conditions responsive to PD-1 blockade alone are known and include, without limitation, melanoma (e.g., advanced or metastatic melanoma), lung cancer (e.g., non-small cell lung cancer and small cell lung cancer), breast cancer (e.g., HER-2 negative breast cancer, estrogen-receptor+/HER-2-breast cancer, and triple negative breast cancer), pancreatic cancer (e.g., pancreatic adenocarcinoma), and Hodgkin lymphoma, as well as bladder, gastric, head and neck, renal, prostate, gynecologic, and hematologic cancers.

[0120] The term “PD-1 ligand” refers to binding partners of the PD-1 receptor and includes both PD-L1 (Freeman et al. (2000) J. Exp. Med. 192:1027) and PD-L2 (Latchman et al. (2001) Nat. Immunol. 2:261). At least two types of human PD-1 ligand polypeptides exist. PD-1 ligand proteins comprise a signal sequence, and an IgV domain, an IgC domain, a transmembrane domain, and a short cytoplasmic tail. Both PD-L1 (See Freeman et al. (2000) J. Exp. Med. 192:1027 for sequence data) and PD-L2 (See Latchman et al. (2001) Nat. Immunol. 2:261 for sequence data) are members of the B7 family of polypeptides. Both PD-L1 and PD-L2 are expressed in placenta, spleen, lymph nodes, thymus, and heart. Only PD-L2 is expressed in pancreas, lung and liver, while only PD-L1 is expressed in fetal liver. Both PD-1 ligands are upregulated on activated monocytes and dendritic cells, although PD-L1 expression is broader. For example, PD-L1 is known to be constitutively expressed and upregulated to higher levels on murine hematopoietic cells (e.g., T cells, B cells, macrophages, dendritic cells (DCs), and bone marrow-derived mast cells) and non-hematopoietic cells (e.g., endothelial, epithelial, and muscle cells), whereas PD-L2 is inducibly expressed on DCs, macrophages, and bone marrow-derived mast cells (see Butte et al. (2007) Immunity 27:111).

[0121] PD-1 ligands comprise a family of polypeptides having certain conserved structural and functional features. The term “family” when used to refer to proteins or nucleic acid molecules, is intended to mean two or more proteins or nucleic acid molecules having a common structural domain or motif and having sufficient amino acid or nucleotide sequence homology, as defined herein. Such family members may be naturally or non-naturally occurring and may be from either the same or different species. For example, a family may contain a first protein of human origin, as well as other, distinct proteins of human origin or alternatively, may contain homologues of non-human origin. Members of a family may also have common functional characteristics. PD-1 ligands are members of the B7 family of polypeptides. The term “B7 family” or “B7 polypeptides” as used herein includes costimulatory polypeptides that share sequence homology with B7 polypeptides, e.g., with B7-1, B7-2, B7h (Swallow et al. (1999) Immunity 11:423), and/or PD-1 ligands (e.g., PD-L1 or PD-L2). For example, human B7-1 and B7-2 share approximately 26% amino acid sequence identity when compared using the BLAST program at NCBI with the default parameters (Blosum62 matrix with gap penalties set at existence 11 and extension 1 (See the NCBI website). The term B7 family also includes variants of these polypeptides which are capable of modulating immune cell function. The B7 family of molecules share a number of conserved regions, including signal domains, IgV domains and the IgC domains. IgV domains and the IgC domains are art-recognized Ig superfamily member domains. These domains correspond to structural units that have distinct folding patterns called Ig folds. Ig folds are comprised of a sandwich of two β sheets, each consisting of anti-parallel β strands of 5-10 amino acids with a conserved disulfide bond between the two sheets in most, but not all, IgC domains of Ig, TCR, and MHC molecules share the same types of sequence patterns and are called the C1-set within the Ig superfamily. Other IgC domains fall within other sets. IgV domains also share sequence patterns and are called V set domains. IgV domains are longer than IgC domains and contain an additional pair of β strands.

[0122] Preferred B7 polypeptides are capable of providing costimulatory or inhibitory signals to immune cells to thereby promote or inhibit immune cell responses. For example, B7 family members that bind to costimulatory receptors increase T cell activation and proliferation, while B7 family members that bind to inhibitory receptors reduce costimulation. Moreover, the same B7 family member may increase or decrease T cell costimulation. For example, when bound to a costimulatory receptor, PD-1 ligand may induce costimulation of immune cells or may inhibit immune cell costimulation, e.g., when present in soluble form. When bound to an inhibitory receptor, PD-1 ligand polypeptides may transmit an inhibitory signal to an immune cell. Preferred B7 family members include B7-1, B7-2, B7h, PD-L1 or PD-L2 and soluble fragments or derivatives thereof. In one embodiment, B7 family members bind to one or more receptors on an immune cell, e.g., CTLA4, CD28, ICOS, PD-1 and/or other receptors, and, depending on the receptor, have the ability to transmit an inhibitory signal or a costimulatory signal to an immune cell, preferably a T cell.

[0123] Modulation of a costimulatory signal results in modulation of effector function of an immune cell. Thus, the term “PD-1 ligand activity” includes the ability of a PD-1 ligand polypeptide to bind its natural receptor(s) (e.g. PD-1 or B7-1), the ability to modulate immune cell costimulatory or inhibitory signals, and the ability to modulate the immune response.

[0124] In various embodiments, the antibodies or their variants (or nucleic acids encoding them) may comprise a sequence provided in Example 2 or Example 4. A few of those sequences are also provided below in Table 1.

TABLE 1

Exemplary Variable Domain Sequences
SEQ ID NO: 21 (VH of anti-H2Kb)
DVQLVESGGGLVQPGGSRKLSCAASGFTFSSFGMHWVRQAPEKGLEWVAYISSGSNTIYYADTVKGR FTISRDNPKNTLFLQMTSLRSEDTAMYYCALTTGSWFAYWGQGTLVTVSA

SEQ ID NO: 22 (VL of anti-H2Kb)
DILLTQSPAILSVRPGERVSFSCRASQSLGTSIHWYQQRTDGSPRLLIKYASESISGIPSRFSGSGS GTDFTLSINSVESEDIADYYCQQSNSWPITFGAGTKLELK

SEQ ID NO: 30 (VH of anti-PD-1)
QVQLQQSGAELVKPGSSVKISCKASGYTFTSHFIHWIKQQPGNGLEWIGGIYPGDGDTEYNQQFNGK ATLTADKSSSTAYMRLSSLTSEDSAVYFCATRVPSYWFFDFWGPGTMVTVSS

SEQ ID NO: 31 (VL of anti-PD-1)
DVALTQTPVAQPVTLGDQASISCRSSQSLVHSNGRTYLEWYLQKPGQSPQLLIYKVSNRFSGVPDRF IGSGSGSDFTLTISRVEPEDLGVYYCFQATHDPNTFGAGTKLELK
* Included in Table 1 are RNA nucleic acid molecules (e.g., thymines replaced with uridines), nucleic acid molecules encoding orthologs of the encoded proteins, as well as DNA or RNA nucleic acid sequences comprising a nucleic acid sequence having at least 80%, 81%, 82%, 83%, 84%, 85%, 86%, 87%, 88%, 89%, 90%, 91%, 92%, 93%, 94%, 95%, 96%, 97%, 98%, 99%, 99.5%, or more identity across their full length with the nucleic acid sequence of any SEQ ID NO or biomarker described in Table 1, or a portion thereof. Such nucleic acid molecules may have a function of the full-length nucleic acid as described further herein.
* Included in Table 1 are orthologs of the proteins, as well as polypeptide molecules comprising an amino acid sequence having at least 80%, 81%, 82%, 83%, 84%, 85%, 86%, 87%, 88%, 89%, 90%, 91%, 92%, 93%, 94%, 95%, 96%, 97%, 98%, 99%, 99.5%, or more identity across their full length with an amino acid sequence of any SEQ ID NO or biomarker described in Table 1, or a portion thereof. Such polypeptides may have a function of the full-length polypeptide as described further herein.

[0125] Since it is well known in the art that antibody heavy and light chain CDR3 domains play a particularly important role in the binding specificity/affinity of an antibody for an antigen, the recombinant monoclonal antibodies of the present invention prepared as set forth above preferably comprise the heavy and light chain CDR3s of variable regions of the present invention. The antibodies further may comprise the CDR2s of variable regions of the present invention. The antibodies further may comprise the CDR1s of variable regions of the present invention. In other embodiments, the antibodies may comprise any combinations of the CDRs. These CDRs, for a given definition (e.g., Kabat), may be determined from the provided VH/VL sequences.

[0126] The CDR1, 2, and/or 3 regions of the engineered antibodies described above may comprise the exact amino acid sequence(s) as those of variable regions of the present invention disclosed herein. However, the ordinarily skilled artisan will appreciate that some deviation from the exact CDR sequences may be possible while still retaining the ability of the antibody to bind PD-1 effectively (e.g., conservative sequence modifications). Accordingly, in another embodiment, the engineered antibody may be composed of one or more CDRs that are, for example, 50%, 60%, 70%, 80%, 85%, 90%, 91%, 92%, 93%, 94%, 95%, 96%, 97%, 98%, 99%, or 99.5% identical to one or more CDRs of the present invention.

[0127] The heavy chain variable domain of the monoclonal antibodies of the present invention may comprise or consist of the vH amino acid sequence set forth in Table 1 and/or the light chain variable domain of the monoclonal antibodies of the present invention may comprise or consist of the vL amino acid sequence set forth in Table 1.

[0128] The monoclonal antibodies of the present invention may be produced and modified by any technique well known in the art. Similarly, such monoclonal antibodies may be chimeric, preferably chimeric mouse/human antibodies. In some embodiments, the monoclonal antibodies are humanized antibodies such that the variable domain comprises human acceptor frameworks regions, and optionally human constant domain where present, and non-human donor CDRs, such as mouse CDRs as defined above.

[0129] The present invention further provides fragments of said monoclonal antibodies which include, but are not limited to, Fv, Fab, F(ab′)2, Fab′, dsFv, scFv, sc(Fv)2 and diabodies; and multispecific antibodies formed from antibody fragments. For example, a number of immunoinhibitory molecules, such as PD-1, PD-L2, PD-L1, CTLA-4, and the like, may be detected in a bispecific or multispecific manner in order to efficiently characterize the expression of such molecules.

[0130] Other fragments of the monoclonal antibodies of the present invention are also contemplated. For example, individual immunoglobulin heavy and/or light chains are provided, wherein the variable domains thereof comprise at least a CDR present in the sequences listed in Table 1. In one embodiment, the immunoglobulin heavy chain comprises at least a CDR having a sequence that is at least 80%, 85%, 90%, 91%, 92%, 93%, 94%, 95%, 96%, 97%, 98%, 99%, 99.5% or 100% identical from the group of heavy chain or light chain variable domain CDRs presented in the sequences listed in Table 1. In another embodiment, an immunoglobulin light chain comprises at least a CDR having a sequence that is at least 80%, 85%, 90%, 91%, 92%, 93%, 94%, 95%, 96%, 97%, 98%, 99%, 99.5% or 100% identical from the group of light chain or heavy chain variable domain CDRs described herein.

[0131] In some embodiments, the immunoglobulin heavy and/or light chain comprises a variable domain comprising at least one of CDR-L1, CDR-L2, CDR-L3, CDR-H1, CDR-H2, or CDR-H3 described herein. Such immunoglobulin heavy chains may comprise or consist of at least one of CDR-H1, CDR-H2, and CDR-H3. Such immunoglobulin light chains may comprise or consist of at least one of CDR-L1, CDR-L2, and CDR-L3.

[0132] In other embodiments, an immunoglobulin heavy and/or light chain according to the present invention comprises or consists of a vH or vL variable domain sequence, respectively, provided in Table 1.

[0133] The present invention further provides polypeptides which have a sequence selected from the group consisting of vH variable domain, vL variable domain, CDR-L1, CDR-L2, CDR-L3, CDR-H1, CDR-H2, and CDR-H3 sequences described herein.

[0134] Antibodies, immunoglobulins, and polypeptides of the invention may be use in an isolated (e.g., purified) form or contained in a vector, such as a membrane or lipid vesicle (e.g. a liposome).

[0135] Some exemplary PD-1 sequences are provided below in Table 2.

TABLE 2

Representative PD-1 Sequences
Human PD-1 cDNA Acid Sequence (NM_005018.2, CDS from position 69 to position 935)

| | | | | | | |
|---|---|---|---|---|---|---|
| 1 | agtttccctt | ccgctcacct | ccgcctgagc | agtggagaag | gcggcactct | ggtggggctg |
| 61 | ctccaggcat | gcagatccca | caggcgccct | ggccagtcgt | ctgggcggtg | ctacaactgg |
| 121 | gctggcggcc | aggatggttc | ttagactccc | cagacaggcc | ctggaacccc | cccaccttct |
| 181 | ccccagccct | gctcgtggtg | accgaagggg | acaacgccac | cttcacctqc | agcttctcca |
| 241 | acacatcgga | gagcttcgtg | ctaaactggt | accgcatgag | ccccagcaac | cagacggaca |
| 301 | agctggccgc | cttccccgag | gaccgcagcc | agcccggcca | ggactgccgc | ttccgtgtca |
| 361 | cacaactgcc | caacgggcgt | gacttccaca | tgagcgtggt | cagggcccgg | cgcaatgaca |
| 421 | gcggcaccta | cctctgtggg | gccatctccc | tggcccccaa | ggcgcagatc | aaagagagcc |
| 481 | tgcgggcaga | gctcagggtg | acagagagaa | gggcagaagt | gcccacagcc | caccccagcc |
| 541 | cctcacccag | gccagccggc | cagttccaaa | ccctggtggt | tggtgtcgtg | ggcggcctgc |
| 601 | tgggcagcct | ggtgctgcta | gtctgggtcc | tggccgtcat | ctgctcccgg | gccgcacgag |
| 661 | ggacaatagg | agccaggcgc | accggccagc | ccctgaagga | ggacccctca | gccgtgcctg |
| 721 | tgttctctgt | ggactatggg | gagctggatt | tccagtggcg | agagaagacc | ccggagcccc |
| 781 | ccgtgccctg | tgtccctgag | cagacggagt | atgccaccat | tgtctttcct | agcggaatgg |
| 841 | gcacctcatc | ccccgcccgc | aggggctcag | ctgacggccc | tcggagtgcc | cagccactga |
| 901 | ggcctgagga | tggacactgc | tcttggcccc | tctgaccggc | ttccttggcc | accagtgttc |
| 961 | tgcagaccct | ccaccatgag | cccgggtcag | cgcatttcct | caggagaagc | aggcagggtg |
| 1021 | caggccattg | caggccgtcc | aggggctgag | ctgcctgggg | gcgaccgggg | ctccagcctg |
| 1081 | cacctgcacc | aggcacagcc | ccaccacagg | actcatgtct | caatgcccac | agtgagccca |
| 1141 | ggcagcaggt | gtcaccgtcc | cctacaggga | gggccagatg | cagtcactgc | ttcaggtcct |
| 1201 | gccagcacag | agctgcctgc | gtccagctcc | ctgaatctct | gctgctgctg | ctgctgctgc |
| 1261 | tgctgctgcc | tgcggcccgg | ggctgaaggc | gccgtggccc | tgcctgacgc | cccggagcct |
| 1321 | cctgcctgaa | cttgggggct | ggttggagat | ggccttggag | cagccaaggt | gcccctggca |
| 1381 | gtggcatccc | gaaacgccct | ggacgcaggg | cccaagactg | ggcacaggag | tgggaggtac |
| 1441 | atggggctgg | ggactcccca | ggagttatct | gctccctgca | ggcctagaga | agtttcaggg |
| 1501 | aaggtcagaa | gagctcctgg | ctgtggtggg | cagggcagga | aacccctcca | cctttacaca |
| 1561 | tgcccaggca | gcacctcagg | ccctttgtgg | ggcagggaag | ctgaggcagt | aagcgggcag |
| 1621 | gcagagctgg | aggcctttca | ggcccagcca | gcactctggc | ctcctgccgc | cgcattccac |
| 1681 | cccagcccct | cacaccactc | gggagaggga | catcctacgg | tcccaaggtc | aggagggcag |
| 1741 | ggctggggtt | gactcaggcc | cctcccagct | gtggccacct | gggtgttggg | agggcagaag |
| 1801 | tgcaggcacc | tagggccccc | catgtgccca | ccctgggagc | tctccttgga | acccattcct |
| 1861 | gaaattattt | aaaggggttg | gccgggctcc | caccagggcc | tgggtgggaa | ggtacaggcg |
| 1921 | ttcccccggg | gcctagtacc | cccgccgtgg | cctatccact | cctcacatcc | acacactgca |
| 1981 | cccccactcc | tggggcaggg | ccaccagcat | ccaggcggcc | agcaggcacc | tgagtggctg |
| 2041 | ggacaaggga | tcccccttcc | ctgtggttct | attatattat | aattataatt | aaatatgaga |
| 2101 | gcatgctaag | gaaaa (SEQ | ID NO: 27) | | | |
| 1 | mqipqapwpv | vwavlqlgwr | pgwfldspdr | pwnpptfspa | llvvtegdna | tftcsfsnts |
| 61 | esfvlnwyrm | spsnqtdkla | afpedrsqpg | qdcrfrvtql | pngrdfhmsv | vrarrndsgt |
| 121 | ylcgaislap | kaqikeslra | elrvterrae | vptahpspsp | rpagqfqtlv | vgvvggllgs |
| 181 | lvllvwvlav | icsraargti | garrtgqplk | edpsavpvfs | vdygeldfqw | rektpeppvp |
| 241 28) | cvpeqteyat | ivfpsgmgts | sparrgsadg | prsaqplrpe | dghcswpl | (SEQ ID NO: |
| 1 | tgagcagcgg | ggaggaggaa | gaggagactg | ctactgaagg | cgacactgcc | aggggctctg |
| 61 | ggcatgtggg | tccggcaggt | accctggtca | ttcacttggg | ctgtgctgca | gttgagctgg |
| 121 | caatcagggt | ggcttctaga | ggtccccaat | gggccctgga | ggtccctcac | cttctaccca |
| 181 | gcctggctca | cagtgtcaga | gggagcaaat | gccaccttca | cctgcagctt | gtccaactgg |
| 241 | tcggaggatc | ttatgctgaa | ctggaaccgc | ctgagtccca | gcaaccagac | tgaaaaacag |
| 301 | gccgccttct | gtaatggttt | gagccaaccc | gtccaggatg | cccgcttcca | gatcatacag |
| 361 | ctgcccaaca | ggcatgactt | ccacatgaac | atccttgaca | cacggcgcaa | tgacagtggc |
| 421 | atctacctct | gtggggccat | ctccctgcac | cccaaggcaa | aaatcgagga | gagccctgga |
| 481 | gcagagctcg | tggtaacaga | gagaatcctg | gagacctcaa | caagatatcc | cagcccctcg |
| 541 | cccaaaccag | aaggccggtt | tcaaggcatg | gtcattggta | tcatgagtgc | cctagtgggt |
| 601 | atccctgtat | tgctgctgct | ggcctgggcc | ctagctgtct | tctgctcaac | aagtatgtca |
| 661 | gaggccagag | gagctggaag | caaggacgac | actctgaagg | aggagccttc | agcagcacct |
| 721 | gtccctagtg | tggcctatga | ggagctggac | ttccagggac | gagagaagac | accagagctc |
| 781 | cctaccgcct | gtgtgcacac | agaatatgcc | accattgtct | tcactgaagg | gctgggtgcc |
| 841 | tcggccatgg | gacgtagggg | ctcagctgat | ggcctgcagg | gtcctcggcc | tccaagacat |
| 901 | gaggatggac | attgttcttg | gcctctttga | ccagattctt | cagccattag | catgctgcag |
| 961 | accctccaca | gagagcaccg | gtccgtccct | cagtcaagag | gagcatgcag | gctacagttc |
| 1021 | agccaaggct | cccagggtct | gagctagctg | gagtgacagc | ccagcgcctg | caccaattcc |
| 1081 | agcacatgca | ctgttgagtg | agagctcact | tcaggtttac | cacaagctgg | gagcagcagg |
| 1141 | cttcccggtt | tcctattgtc | acaaggtgca | gagctggggc | ctaagcctat | gtctcctgaa |
| 1201 | tcctactgtt | gggcacttct | agggacttga | gacactatag | ccaatggcct | ctgtgggttc |
| 1261 | tgtgcctgga | aatggagaga | tctgagtaca | gcctgctttg | aatggccctg | tgaggcaacc |
| 1321 | ccaaagcaag | ggggtccagg | tatactatgg | gcccagcacc | taaagccacc | cttgggagat |
| 1381 | gatactcagg | tgggaaattc | gtagactggg | ggactgaacc | aatcccaaga | tctggaaaag |
| 1441 | ttttgatgaa | gacttgaaaa | gctcctagct | tcgggggtct | gggaagcatg | agcacttacc |
| 1501 | aggcaaaagc | tccgtgagcg | tatctgctgt | ccttctgcat | gcccaggtac | ctcagttttt |
| 1561 | ttcaacagca | aggaaactag | ggcaataaag | ggaaccagca | gagctagagc | cacccacaca |
| 1621 | tccagggggc | acttgactct | ccctactcct | cctaggaacc | aaaaggacaa | agtccatgtt |
| 1681 | gacagcaggg | aaggaaaggg | ggatataacc | ttgacgcaaa | ccaacactgg | ggtgttagaa |
| 1741 | tctcctcatt | cactctgtcc | tggagttggg | ttctggctct | ccttcacacc | taggactctg |
| 1801 | aaatgagcaa | gcacttcaga | cagtcagggt | agcaagagtc | tagctgtctg | gtgggcaccc |
| 1861 | aaaatgacca | gggcttaagt | ccctttcctt | tggtttaagc | ccgttataat | taaatggtac |
| 1921 NO: 29) | caaaagcttt | aaaaaaaaaa | aaaaaaaaaa | aaaaaaaaaa | aaaaaaaaaa | aa (SEQ ID |
| 1 | mwvrqvpwsf | twavlqlswq | sgwllevpng | pwrsltfypa | wltvsegana | tftcslsnws |
| 61 | edlmlnwnrl | spsnqtekqa | afcnglsqpv | qdarfqiiql | pnrhdfhmni | ldtrrndsgi |
| 121 | ylcgaislhp | kakieespga | elvvterile | tstrypspsp | kpegrfqgmv | igimsalvgi |
| 181 | pvllllawal | avfcstsmse | argagskddt | lkeepsaapv | psvayeeldf | qgrektpelp |
| 241 30) | tacvhteyat | ivfteglgas | amgrrgsadg | lqgprpprhe | dghcswpl | (SEQ ID NO: |

* Included in Table 2 are RNA nucleic acid molecules (e.g., thymines replaced with uridines), nucleic acid molecules encoding orthologs of the encoded proteins, as well as DNA or RNA nucleic acid sequences comprising a nucleic acid sequence having at least 80%, 81%, 82%, 83%, 84%, 85%, 86%, 87%, 88%, 89%, 90%, 91%, 92%, 93%, 94%, 95%, 96%, 97%, 98%, 99%, 99.5%, or more identity across their full length with the nucleic acid sequence of any SEQ ID NO or biomarker described in Table 2, or a portion thereof. Such nucleic acid molecules may have a function of the full-length nucleic acid as described further herein.
* Included in Table 2 are orthologs of the proteins, as well as polypeptide molecules comprising an amino acid sequence having at least 80%, 81%, 82%, 83%, 84%, 85%, 86%, 87%, 88%, 89%, 90%, 91%, 92%, 93%, 94%, 95%, 96%, 97%, 98%, 99%, 99.5%, or more identity across their full length with an amino acid sequence of any SEQ ID NO or biomarker described in Table 2, or a portion thereof. Such polypeptides may have a function of the full-length polypeptide as described further herein.

### III. Nucleic Acids, Vectors, and Recombinant Host Cells

[0136] A further object of the invention relates to nucleic acid sequences encoding bispecific molecules, monoclonal antibodies and fragments thereof, immunoglobulins, and polypeptides of the present invention.

[0137] In a particular embodiment, the invention relates to a nucleic acid sequence encoding the vH domain and/or vL domain of a mAb described herein, such as those disclosed in Table 1, Example 2, or Example 4.

[0138] Typically, said nucleic acid is a DNA or RNA molecule, which may be included in any suitable vector, such as a plasmid, cosmid, episome, artificial chromosome, phage or a viral vector.

[0139] The terms “vector”, “cloning vector” and “expression vector” mean the vehicle by which a DNA or RNA sequence (e.g. a foreign gene) may be introduced into a host cell, so as to transform the host and promote expression (e.g. transcription and translation) of the introduced sequence. Thus, a further object of the invention relates to a vector comprising a nucleic acid of the present invention.

[0140] Such vectors may comprise regulatory elements, such as a promoter, enhancer, terminator and the like, to cause or direct expression of said polypeptide upon administration to a subject. Examples of promoters and enhancers used in the expression vector for animal cell include early promoter and enhancer of SV40 (Mizukami T. et al. 1987), LTR promoter and enhancer of Moloney mouse leukemia virus (Kuwana Y et al. 1987), promoter (Mason J O et al. 1985) and enhancer (Gillies S D et al. 1983) of immunoglobulin H chain and the like.

[0141] Any expression vector for animal cell may be used. Examples of suitable vectors include pAGE107 (Miyaji H et al. 1990), pAGE103 (Mizukami T et al. 1987), pHSG274 (Brady G et al. 1984), pKCR (O′Hare K et al. 1981), pSG1 beta d2-4-(Miyaji H et al. 1990) and the like. Other representative examples of plasmids include replicating plasmids comprising an origin of replication, or integrative plasmids, such as for instance pUC, pcDNA, pBR, and the like. Representative examples of viral vector include adenoviral, retroviral, herpes virus and AAV vectors. Such recombinant viruses may be produced by techniques known in the art, such as by transfecting packaging cells or by transient transfection with helper plasmids or viruses. Typical examples of virus packaging cells include PA317 cells, PsiCRIP cells, GPenv-positive cells, 293 cells, etc. Detailed protocols for producing such replication-defective recombinant viruses may be found for instance in WO 95/14785, WO 96/22378, U.S. Pat. No. 5,882,877, U.S. Pat. No. 6,013,516, U.S. Pat. No. 4,861,719, U.S. Pat. No. 5,278,056 and WO 94/19478.

[0142] A further object of the present invention relates to a cell which has been transfected, infected or transformed by a nucleic acid and/or a vector according to the invention. The term “transformation” means the introduction of a “foreign” (i.e., extrinsic or extracellular) gene, DNA or RNA sequence to a host cell, so that the host cell will express the introduced gene or sequence to produce a desired substance, typically a protein or enzyme coded by the introduced gene or sequence. A host cell that receives and expresses introduced DNA or RNA has been “transformed.”

[0143] The nucleic acids of the present invention may be used to produce a recombinant polypeptide of the invention in a suitable expression system. The term “expression system” means a host cell and compatible vector under suitable conditions, e.g. for the expression of a protein coded for by foreign DNA carried by the vector and introduced to the host cell.

[0144] Common expression systems include E. coli host cells and plasmid vectors, insect host cells and Baculovirus vectors, and mammalian host cells and vectors. Other examples of host cells include, without limitation, prokaryotic cells (such as bacteria) and eukaryotic cells (such as yeast cells, mammalian cells, insect cells, plant cells, etc.). Specific examples include E. coli, Kluyveromyces or Saccharomyces yeasts, mammalian cell lines (e.g., Vero cells, CHO cells, 3T3 cells, COS cells, etc.) as well as primary or established mammalian cell cultures (e.g., produced from lymphoblasts, fibroblasts, embryonic cells, epithelial cells, nervous cells, adipocytes, etc.). Examples also include mouse SP2/0-Ag14 cell (ATCC CRL1581), mouse P3X63-Ag8.653 cell (ATCC CRL1580), CHO cell in which a dihydrofolate reductase gene (hereinafter referred to as “DHFR gene”) is defective (Urlaub G et al; 1980), rat YB2/3HL.P2.G11.16Ag.20 cell (ATCC CRL 1662, hereinafter referred to as “YB2/0 cell”), and the like. The YB2/0 cell is preferred, since ADCC activity of chimeric or humanized antibodies is enhanced when expressed in this cell.

[0145] The present invention also relates to a method of producing a recombinant host cell expressing an antibody or a polypeptide of the invention according to the invention, said method comprising the steps consisting of (i) introducing in vitro or ex vivo a recombinant nucleic acid or a vector as described above into a competent host cell, (ii) culturing in vitro or ex vivo the recombinant host cell obtained and (iii), optionally, selecting the cells which express and/or secrete said antibody or polypeptide. Such recombinant host cells may be used for the production of antibodies and polypeptides of the invention.

[0146] In another aspect, the present invention provides isolated nucleic acids that hybridize under selective hybridization conditions to a polynucleotide disclosed herein. Thus, the polynucleotides of this embodiment may be used for isolating, detecting, and/or quantifying nucleic acids comprising such polynucleotides. For example, polynucleotides of the present invention may be used to identify, isolate, or amplify partial or full-length clones in a deposited library. In some embodiments, the polynucleotides are genomic or cDNA sequences isolated, or otherwise complementary to, a cDNA from a human or mammalian nucleic acid library. Preferably, the cDNA library comprises at least 80% full-length sequences, preferably, at least 85% or 90% full-length sequences, and, more preferably, at least 95% full-length sequences. The cDNA libraries may be normalized to increase the representation of rare sequences. Low or moderate stringency hybridization conditions are typically, but not exclusively, employed with sequences having a reduced sequence identity relative to complementary sequences. Moderate and high stringency conditions may optionally be employed for sequences of greater identity. Low stringency conditions allow selective hybridization of sequences having about 70% sequence identity and may be employed to identify orthologous or paralogous sequences. Optionally, polynucleotides of this invention will encode at least a portion of an antibody encoded by the polynucleotides described herein. The polynucleotides of this invention embrace nucleic acid sequences that may be employed for selective hybridization to a polynucleotide encoding an antibody of the present invention. See, e.g., Ausubel, supra; Colligan, supra, each entirely incorporated herein by reference.

### IV. Methods of Producing Bispecific Molecules and Antibodies

[0147] Bispecific molecules, antibodies and fragments thereof, immunoglobulins, and polypeptides of the present invention may be produced by any technique known in the art, such as, without limitation, any chemical, biological, genetic or enzymatic technique, either alone or in combination.

[0148] Knowing the amino acid sequence of the desired sequence, one skilled in the art may readily produce said antibodies or polypeptides, by standard techniques for production of polypeptides. For instance, they may be synthesized using well-known solid phase method, preferably using a commercially available peptide synthesis apparatus (such as that made by Applied Biosystems, Foster City, Calif.) and following the manufacturer’s instructions. Alternatively, antibodies and other polypeptides of the present invention may be synthesized by recombinant DNA techniques as is well-known in the art. For example, these fragments may be obtained as DNA expression products after incorporation of DNA sequences encoding the desired (poly)peptide into expression vectors and introduction of such vectors into suitable eukaryotic or prokaryotic hosts that will express the desired polypeptide, from which they may be later isolated using well-known techniques.

[0149] In particular, the present invention further relates to a method of producing an antibody or a polypeptide of the invention, which method comprises the steps consisting of: (i) culturing a transformed host cell according to the invention under conditions suitable to allow expression of said antibody or polypeptide; and (ii) recovering the expressed antibody or polypeptide.

[0150] Antibodies and other polypeptides of the present invention are suitably separated from the culture medium by conventional immunoglobulin purification procedures such as, for example, protein A-Sepharose, hydroxylapatite chromatography, gel electrophoresis, dialysis, affinity chromatography, ammonium sulfate or ethanol precipitation, acid extraction, anion or cation exchange chromatography, phosphocellulose chromatography, hydrophobic interaction chromatography, hydroxylapatite chromatography and lectin chromatography. High performance liquid chromatography (“HPLC”) may also be employed for purification. See, e.g., Colligan, Current Protocols in Immunology, or Current Protocols in Protein Science, John Wiley & Sons, NY, N.Y., (1997-2001), e.g., Chapters 1, 4, 6, 8, 9, 10, each entirely incorporated herein by reference.

[0151] Chimeric antibodies (e.g., mouse-human chimeras) of the present invention may be produced by obtaining nucleic sequences encoding VL and VH domains as previously described, constructing a human chimeric antibody expression vector by inserting them into an expression vector for animal cell having genes encoding human antibody CH and human antibody CL, and expressing the coding sequence by introducing the expression vector into an animal cell. The CH domain of a human chimeric antibody may be any region which belongs to human immunoglobulin, such as the IgG class or a subclass thereof, such as IgG1, IgG2, IgG3 and IgG4. Similarly, the CL of a human chimeric antibody may be any region which belongs to Ig, such as the kappa class or lambda class. chimeric and humanized monoclonal antibodies, comprising both human and non-human portions, which may be made using standard recombinant DNA techniques, are within the scope of the invention. Such chimeric and humanized monoclonal antibodies may be produced by recombinant DNA techniques known in the art, for example using methods described in Robinson et al. International Patent Publication PCT/US86/02269; Akira et al. European Patent Application 184,187; Taniguchi, M. European Patent Application 171,496; Morrison et al. European Patent Application 173,494; Neuberger et al. PCT Application WO 86/01533; Cabilly et al. U.S. Pat. No. 4,816,567; Cabilly et al. European Patent Application 125,023; Better et al. (1988) Science 240:1041-1043; Liu et al. (1987) Proc. Natl. Acad. Sci. USA 84:3439-3443; Liu et al. (1987) J. Immunol. 139:3521-3526; Sun et al. (1987) Proc. Natl. Acad. Sci. 84:214-218; Nishimura et al. (1987) Cancer Res. 47:999-1005; Wood et al. (1985) Nature 314:446-449; Shaw et al. (1988) J. Natl. Cancer Inst. 80:1553-1559); Morrison, S. L. (1985) Science 229:1202-1207; Oi et al. (1986) Biotechniques 4:214; Winter U.S. Pat. 5,225,539; Jones et al. (1986) Nature 321:552-525; Verhoeyan et al. (1988) Science 239:1534; and Beidler et al. (1988) J. Immunol. 141:4053-4060.

[0152] In addition, humanized antibodies may be made according to standard protocols such as those disclosed in U.S. Pat. 5,565,332. In another embodiment, antibody chains or specific binding pair members may be produced by recombination between vectors comprising nucleic acid molecules encoding a fusion of a polypeptide chain of a specific binding pair member and a component of a replicable generic display package and vectors containing nucleic acid molecules encoding a second polypeptide chain of a single binding pair member using techniques known in the art, e.g., as described in U.S. Pats. 5,565,332, 5,871,907, or 5,733,743. Humanized antibodies of the present invention may be produced by obtaining nucleic acid sequences encoding CDR domains, as previously described, constructing a humanized antibody expression vector by inserting them into an expression vector for animal cell having genes encoding (i) a heavy chain constant region identical to that of a human antibody and (ii) a light chain constant region identical to that of a human antibody, and expressing the genes by introducing the expression vector into an animal cell.

[0153] The humanized antibody expression vector may be either of a type in which a gene encoding an antibody heavy chain and a gene encoding an antibody light chain exists on separate vectors or of a type in which both genes exist on the same vector (tandem type).

[0154] Methods for producing humanized antibodies based on conventional recombinant DNA and gene transfection techniques are well known in the art (See, e.g., Riechmann L. et al. 1988; Neuberger M S. et al. 1985). Antibodies may be humanized using a variety of techniques known in the art including, for example, CDR-grafting (EP 239,400; PCT publication WO91/09967; U.S. Pat. Nos. 5,225,539; 5,530,101; and 5,585,089), veneering or resurfacing (EP 592,106; EP 519,596; Padlan EA (1991); Studnicka GM et al. (1994); Roguska M A. et al. (1994)), and chain shuffling (U.S. Pat. No. 5,565,332). The general recombinant DNA technology for preparation of such antibodies is also known (see European Patent Application EP 125023 and International Patent Application WO 96/02576).

[0155] Similarly, bispecific or multispecific antibodies described herein may be made according to standard procedures. For example, triomas and hybrid hybridomas are two examples of cell lines that may secrete bispecific or multispecific antibodies. Examples of bispecific and multispecific antibodies produced by a hybrid hybridoma or a trioma are disclosed in U.S. Pat. 4,474,893. Such antibodies may also be constructed by chemical means (Staerz et al. (1985) Nature 314:628, and Perez et al. (1985) Nature 316:354) and hybridoma technology (Staerz and Bevan (1986) Proc. Natl. Acad. Sci. USA, 83:1453, and Staerz and Bevan (1986) Immunol. Today 7:241). Alternatively, such antibodiesmay also be generated by making heterohybridomas by fusing hybridomas or other cells making different antibodies, followed by identification of clones producing and co-assembling the desired antibodies. They may also be generated by chemical or genetic conjugation of complete immunoglobulin chains or portions thereof such as Fab and Fv sequences. The antibody component may bind to a polypeptide or a fragment thereof of one or more biomarkers of the invention, including one or more immunoinhibitory biomarkers described herein.

[0156] In addition, methods for producing antibody fragments are well known. For example, Fab fragments of the present invention may be obtained by treating an antibody with a protease, papaine. Also, Fabs may be produced by inserting DNA encoding Fabs of the antibody into a vector for prokaryotic expression system, or for eukaryotic expression system, and introducing the vector into a procaryote or eucaryote (as appropriate) to express the Fabs.

[0157] Similarly, F(ab′)2 fragments of the present invention may be obtained treating an antibody with a protease, pepsin. Also, the F(ab′)2 fragment may be produced by binding Fab′ described below via a thioether bond or a disulfide bond.

[0158] Fab′ fragments of the present invention may be obtained treating F(ab′)2 with a reducing agent, dithiothreitol. Also, the Fab′ fragments may be produced by inserting DNA encoding a Fab′ fragment of the antibody into an expression vector for prokaryote, or an expression vector for eukaryote, and introducing the vector into a prokaryote or eukaryote (as appropriate) to perform its expression.

[0159] In addition, scFvs of the present invention may be produced by obtaining cDNA encoding the VH and VL domains as previously described, constructing DNA encoding scFv, inserting the DNA into an expression vector for prokaryote, or an expression vector for eukaryote, and then introducing the expression vector into a prokaryote or eukaryote (as appropriate) to express the scFv. To generate a humanized scFv fragment, a well known technology called CDR grafting may be used, which involves selecting the complementary determining regions (CDRs) from a donor scFv fragment, and grafting them onto a human scFv fragment framework of known three dimensional structure (see, e.g., WO98/45322; WO 87/02671; U.S. Pat. No. 5,859,205; U.S. Pat. No. 5,585,089; U.S. Pat. No. 4,816,567; EP0173494).

### V. Modification of Bispecific Molecules, Antibodies, Immunoglobulins, and Polypeptides

[0160] Amino acid sequence modification(s) of the bispecific molecules and antibodies described herein are contemplated. For example, it may be desirable to improve the binding affinity and/or other biological properties of the antibody. It is known that when a humanized antibody is produced by simply grafting only CDRs in VH and VL of an antibody derived from a non-human animal in FRs of the VH and VL of a human antibody, the antigen binding activity is reduced in comparison with that of the original antibody derived from a non-human animal. It is considered that several amino acid residues of the VH and VL of the non-human antibody, not only in CDRs but also in FRs, are directly or indirectly associated with the antigen binding activity. Hence, substitution of these amino acid residues with different amino acid residues derived from FRs of the VH and VL of the human antibody would reduce binding activity and may be corrected by replacing the amino acids with amino acid residues of the original antibody derived from a non-human animal.

[0161] Modifications and changes may be made in the structure of the antibodies of the present invention, and in the DNA sequences encoding them, and still obtain a functional molecule that encodes an antibody and polypeptide with desirable characteristics. For example, certain amino acids may be substituted by other amino acids in a protein structure without appreciable loss of activity. Since the interactive capacity and nature of a protein define the protein’s biological functional activity, certain amino acid substitutions may be made in a protein sequence, and, of course, in its DNA encoding sequence, while nevertheless obtaining a protein with like properties. It is thus contemplated that various changes may be made in the antibodies sequences of the invention, or corresponding DNA sequences which encode said polypeptides, without appreciable loss of their biological activity.

[0162] In one embodiment, amino acid changes may be achieved by changing codons in the DNA sequence to encode conservative substitutions based on conservation of the genetic code. Specifically, there is a known and definite correspondence between the amino acid sequence of a particular protein and the nucleotide sequences that may code for the protein, as defined by the genetic code (shown below). Likewise, there is a known and definite correspondence between the nucleotide sequence of a particular nucleic acid and the amino acid sequence encoded by that nucleic acid, as defined by the genetic code.

| | |
|---|---|
| GENETIC CODE | |
| Alanine (Ala, A) | GCA, GCC, GCG, GCT |
| Arginine (Arg, R) | AGA, ACG, CGA, CGC, CGG, CGT |
| Asparagine (Asn, N) AAC, AAT | |
| Aspartic acid (Asp, D) | GAC, GAT |
| Cysteine (Cys, C) | TGC, TGT |
| Glutamic acid (Glu, E) | GAA, GAG |
| Glutamine (Gln, Q) | CAA, CAG |
| Glycine (Gly, G) | GGA, GGC, GGG, GGT |
| Histidine (His, H) | CAC, CAT |
| Isoleucine (Ile, I) | ATA, ATC, ATT |
| Leucine (Leu, L) | CTA, CTC, CTG, CTT, TTA, TTG |
| Lysine (Lys, K) | AAA, AAG |
| Methionine (Met, M) | ATG |
| Phenylalanine (Phe, F) | TTC, TTT |
| Proline (Pro, P) | CCA, CCC, CCG, CCT |

| | |
|---|---|
| Serine (Ser, S) | AGC, AGT, TCA, TCC, TCG, TCT |
| Threonine (Thr, T) | ACA, ACC, ACG, ACT |
| Tryptophan (Trp, W) | TGG |
| Tyrosine (Tyr, Y) | TAC, TAT |
| Valine (Val, V) | GTA, GTC, GTG, GTT |
| Termination signal (end) | TAA, TAG, TGA |

[0163] An important and well known feature of the genetic code is its redundancy, whereby, for most of the amino acids used to make proteins, more than one coding nucleotide triplet may be employed (illustrated above). Therefore, a number of different nucleotide sequences may code for a given amino acid sequence. Such nucleotide sequences are considered functionally equivalent since they result in the production of the same amino acid sequence in all organisms (although certain organisms may translate some sequences more efficiently than they do others). Moreover, occasionally, a methylated variant of a purine or pyrimidine may be found in a given nucleotide sequence. Such methylations do not affect the coding relationship between the trinucleotide codon and the corresponding amino acid.

[0164] In making the changes in the amino sequences of polypeptide, the hydropathic index of amino acids may be considered. The importance of the hydropathic amino acid index in conferring interactive biologic function on a protein is generally understood in the art. It is accepted that the relative hydropathic character of the amino acid contributes to the secondary structure of the resultant protein, which in turn defines the interaction of the protein with other molecules, for example, enzymes, substrates, receptors, DNA, antibodies, antigens, and the like. Each amino acid has been assigned a hydropathic index on the basis of their hydrophobicity and charge characteristics these are: isoleucine (+4.5); valine (+4.2); leucine (+3.8); phenylalanine (+2.8); cysteine/cystine (+2.5); methionine (+1.9); alanine (+1.8); glycine (-0.4); threonine (-0.7); serine (-0.8); tryptophane (-0.9); tyrosine (-1.3); proline (-1.6); histidine (-3.2); glutamate (-3.5); glutamine (-3.5); aspartate (<RTI 3.5); asparagine (-3.5); lysine (-3.9); and arginine (-4.5).

[0165] It is known in the art that certain amino acids may be substituted by other amino acids having a similar hydropathic index or score and still result in a protein with similar biological activity, i.e., still obtain a biological functionally equivalent protein.

[0166] As outlined above, amino acid substitutions are generally therefore based on the relative similarity of the amino acid side-chain substituents, for example, their hydrophobicity, hydrophilicity, charge, size, and the like. Exemplary substitutions which take various of the foregoing characteristics into consideration are well known to those of skill in the art and include: arginine and lysine; glutamate and aspartate; serine and threonine; glutamine and asparagine; and valine, leucine and isoleucine.

[0167] Another type of amino acid modification of the antibody of the invention may be useful for altering the original glycosylation pattern of the antibody to, for example, increase stability. By “altering” is meant deleting one or more carbohydrate moieties found in the antibody, and/or adding one or more glycosylation sites that are not present in the antibody. Glycosylation of antibodies is typically N-linked. “N-linked” refers to the attachment of the carbohydrate moiety to the side chain of an asparagine residue. The tripeptide sequences asparagine-X-serine and asparagines-X-threonine, where X is any amino acid except proline, are the recognition sequences for enzymatic attachment of the carbohydrate moiety to the asparagine side chain. Thus, the presence of either of these tripeptide sequences in a polypeptide creates a potential glycosylation site. Addition of glycosylation sites to the antibody is conveniently accomplished by altering the amino acid sequence such that it contains one or more of the above-described tripeptide sequences (for N-linked glycosylation sites). Another type of covalent modification involves chemically or enzymatically coupling glycosides to the antibody. These procedures are advantageous in that they do not require production of the antibody in a host cell that has glycosylation capabilities for N- or O-linked glycosylation. Depending on the coupling mode used, the sugar(s) may be attached to (a) arginine and histidine, (b) free carboxyl groups, (c) free sulfhydryl groups such as those of cysteine, (d) free hydroxyl groups such as those of serine, threonine, orhydroxyproline, (e) aromatic residues such as those of phenylalanine, tyrosine, or tryptophan, or (f) the amide group of glutamine. For example, such methods are described in WO87/05330.

[0168] Similarly, removal of any carbohydrate moieties present on the antibody may be accomplished chemically or enzymatically. Chemical deglycosylation requires exposure of the antibody to the compound trifluoromethanesulfonic acid, or an equivalent compound. This treatment results in the cleavage of most or all sugars except the linking sugar (N-acetylglucosamine or N-acetylgalactosamine), while leaving the antibody intact. Chemical deglycosylation is described by Sojahr H. et al. (1987) and by Edge, A S. et al. (1981). Enzymatic cleavage of carbohydrate moieties on antibodies may be achieved by the use of a variety of endo- and exo-glycosidases as described by Thotakura, N R. et al. (1987).

[0169] Other modifications may involve the formation of immunoconjugates. For example, in one type of covalent modification, antibodies or proteins are covalently linked to one of a variety of non proteinaceous polymers, e.g., polyethylene glycol, polypropylene glycol, or polyoxyalkylenes, in the manner set forth in U.S. Pat. No. 4,640,835; 4,496,689; 4,301,144; 4,670,417; 4,791,192 or 4,179,337.

[0170] Conjugation of antibodies or other proteins of the present invention with heterologous agents may be made using a variety of bifunctional protein coupling agents including but not limited to N-succinimidyl (2-pyridyldithio) propionate (SPDP), succinimidyl (N-maleimidomethyl)cyclohexane-1-carboxylate, iminothiolane (IT), bifunctional derivatives of imidoesters (such as dimethyl adipimidate HCL), active esters (such as disuccinimidyl suberate), aldehydes (such as glutaraldehyde), bis-azido compounds (such as bis (p-azidobenzoyl) hexanediamine), bis-diazonium derivatives (such as bis-(p-diazoniumbenzoyl)-ethylenediamine), diisocyanates (such as toluene 2,6 diisocyanate), and bis-active fluorine compounds (such as 1,5-difluoro-2,4-dinitrobenzene). For example, carbon labeled 1-isothiocyanatobenzyl methyldiethylene triaminepentaacetic acid (MX-DTPA) is an exemplary chelating agent for conjugation of radionucleotide to the antibody (WO 94/11026).

[0171] In another aspect, the present invention features antibodies conjugated to a therapeutic moiety, such as a cytotoxin, a drug, and/or a radioisotope. When conjugated to a cytotoxin, these antibody conjugates are referred to as “immunotoxins.” A cytotoxin or cytotoxic agent includes any agent that is detrimental to (e.g., kills) cells. Examples include taxol, cytochalasin B, gramicidin D, ethidium bromide, emetine, mitomycin, etoposide, tenoposide, vincristine, vinblastine, colchicin, doxorubicin, daunorubicin, dihydroxy anthracin dione, mitoxantrone, mithramycin, actinomycin D, 1-dehydrotestosterone, glucocorticoids, procaine, tetracaine, lidocaine, propranolol, and puromycin and analogs or homologs thereof. Therapeutic agents include, but are not limited to, antimetabolites (e.g., methotrexate, 6-mercaptopurine, 6-thioguanine, cytarabine, 5-fluorouracil decarbazine), alkylating agents (e.g., mechlorethamine, thioepa chlorambucil, melphalan, carmustine (BSNU) and lomustine (CCNU), cyclothosphamide, busulfan, dibromomannitol, streptozotocin, mitomycin C, and cis-dichlorodiamine platinum (II) (DDP) cisplatin), anthracyclines (e.g., daunorubicin (formerly daunomycin) and doxorubicin), antibiotics (e.g., dactinomycin (formerly actinomycin), bleomycin, mithramycin, and anthramycin (AMC)), and anti-mitotic agents (e.g., vincristine and vinblastine). An antibody of the present invention may be conjugated to a radioisotope, e.g., radioactive iodine, to generate cytotoxic radiopharmaceuticals for treating a related disorder, such as a cancer.

[0172] Conjugated antibodies may be used diagnostically or prognostically to monitor polypeptide levels in tissue as part of a clinical testing procedure, e.g., to determine the efficacy of a given treatment regimen or to select patients most likely to response to an immunotherapy. For example, cells may be permeabilized in a flow cytometry assay to allow antibodiesto bind to their epitopes and allow detection of the binding by analyzing signals emanating from the conjugated molecules. Detection may be facilitated by coupling (ie., physically linking) the antibody to a detectable substance. Examples of detectable substances include various enzymes, prosthetic groups, fluorescent materials, luminescent materials, bioluminescent materials, and radioactive materials. Examples of suitable enzymes include horseradish peroxidase, alkaline phosphatase, β-galactosidase, or acetylcholinesterase; examples of suitable prosthetic group complexes include streptavidin/biotin and avidin/biotin; examples of suitable fluorescent materials include umbelliferone, fluorescein, fluorescein isothiocyanate (FITC), rhodamine, dichlorotriazinylamine fluorescein, dansyl chloride or phycoerythrin (PE); an example of a luminescent material includes luminol; examples of bioluminescent materials include luciferase, luciferin, and aequorin, and examples of suitable radioactive material include ¹²⁵I, ¹³¹I, ³⁵S, or ³H. [0134] As used herein, the term “labeled”, with regard to the antibody, is intended to encompass direct labeling of the antibody by coupling (i.e., physically linking) a detectable substance, such as a radioactive agent or a fluorophore (e.g. fluorescein isothiocyanate (FITC) or phycoerythrin (PE) or indocyanine (Cy5)) to the antibody, as well as indirect labeling of the antibody by reactivity with a detectable substance.

[0173] The antibody conjugates of the present invention may be used to modify a given biological response. The therapeutic moiety is not to be construed as limited to classical chemical therapeutic agents. For example, the drug moiety may be a protein or polypeptide possessing a desired biological activity. Such proteins may include, for example, an enzymatically active toxin, or active fragment thereof, such as abrin, ricin A, pseudomonas exotoxin, or diphtheria toxin; a protein such as tumor necrosis factor or interferon-.gamma.; or, biological response modifiers such as, for example, lymphokines, interleukin-1 (“IL-1”), interleukin-2 (“IL-2”), interleukin-6 (“IL-6”), granulocyte macrophage colony stimulating factor (“GM-CSF”), granulocyte colony stimulating factor (“G-CSF”), or other cytokines or growth factors.

[0174] Techniques for conjugating such therapeutic moiety to antibodies are well known, see, e.g., Arnon et al., “Monoclonal Antibodies For Immunotargeting Of Drugs In Cancer Therapy”, in Monoclonal Antibodies And Cancer Therapy, Reisfeld et al. (eds.), pp. 243 56 (Alan R. Liss, Inc. 1985); Hellstrom et al., “Antibodies For Drug Delivery”, in Controlled Drug Delivery (2nd Ed.), Robinson et al. (eds.), pp. 623 53 (Marcel Dekker, Inc. 1987); Thorpe, “Antibody Carriers Of Cytotoxic Agents In Cancer Therapy: A Review”, in Monoclonal Antibodies ‘84: Biological And Clinical Applications, Pinchera et al. (eds.), pp. 475 506 (1985); “Analysis, Results, And Future Prospective Of The Therapeutic Use Of Radiolabeled Antibody In Cancer Therapy”, in Monoclonal Antibodies For Cancer Detection And Therapy, Baldwin et al. (eds.), pp. 303 16 (Academic Press 1985), and Thorpe et al., “The Preparation And Cytotoxic Properties Of Antibody-Toxin Conjugates”, Immunol. Rev., 62:119 58 (1982).

[0175] In some embodiments, conjugations may be made using a “cleavable linker” facilitating release of the cytotoxic agent or growth inhibitory agent in a cell. For example, an acid-labile linker, peptidase-sensitive linker, photolabile linker, dimethyl linker or disulfide-containing linker (See e.g. U.S. Pat. No. 5,208,020) may be used. Alternatively, a fusion protein comprising the antibody and cytotoxic agent or growth inhibitory agent may be made, by recombinant techniques or peptide synthesis. The length of DNA may comprise respective regions encoding the two portions of the conjugate either adjacent one another or separated by a region encoding a linker peptide which does not destroy the desired properties of the conjugate.

### VI. Uses and Methods of the Invention

[0176] The antibodies, immunoglobulins, polypeptides, and nucleic acids of the present invention described herein may be used in the treatment of numerous conditions, as further described below.

### A. Solid Organ Transplantation

[0177] Pharmacologic immunosuppressants are used to prevent the rejection of solid organ allografts. These agents inhibit T cell activity not only at the site of the allograft but throughout the body, and as a result, transplant recipients are at an increased risk of infection and cancer. Existing immunosuppressants may also result in cumulative toxicity and impair organ function, which may limit their dosing. Organ rejection may still occur despite treatment with existing agents.

[0178] When a recipient receives a transplanted organ graft with at least one mismatched allele of either MHC class I or MHC class II, the cells in that graft express a surface antigen that is not present on any other tissues in the body of the recipient. A LoSTIM (i.e., bispecific molecule, as used in this disclosure) with specific avidity for the protein product of that mismatched MHC allele would inhibit T cell activity against the cells of the allograft but not the activity of T cells elsewhere in the recipient’s body. Thus, a LoSTIM would not be expected to increase the risk of infection or cancer in parts of the recipient’s body outside of the allograft. LoSTIMs could serve as either replacements for existing immunosuppressants or as adjunctive agents, allowing existing immunosuppressants to be used at a lower dose with reduced toxicity.

### B. Autoimmune Disease

[0179] Generally speaking, autoimmune diseases result in pathologic inflammation of a subset of tissue types rather than involving all tissues in the body. Some examples of this include rheumatoid arthritis, colitis, Chron’s disease, autoimmune hepatitis, lupus, and type I diabetes. Current pharmacologic immunosuppressants used to treat autoimmune diseases, however, inhibit immune cell activity throughout the body. This systemic immunosuppression places patients at increased risk of infection and cancer and current agents are sometimes unable to adequately suppress autoimmunity.

[0180] A LoSTIM with specific avidity for antigens expressed on the surface of pathologically inflamed tissues would inhibit T cell activity at that location but not elsewhere in the body. Thus, a LoSTIM would be expected to treat autoimmune conditions mediated by T cells, but not to increase the risk of infection or cancer in parts of the body that are not targeted for immunosuppression by the LoSTIM.

### C. Treatment of Cancer: Checkpoint-Inhibitor Immune Related Adverse Effects

[0181] Immune-related adverse effects (irAE) occur in a significant proportion of patients receiving immunotherapies that inhibit the PD-1/PDL1 signaling axis, and on occasion, these adverse effects may be severe. The most common irAE include pneumonitis, colitis, hepatitis, dermatitis, thyroiditis, and arthritis, but autoimmunity may be induced in almost any tissue. Management typically involves withdrawal of the immunotherapy and treatment with steroids. Some patients are not able to be tapered off of steroids and most patients are not re-challenged with immunotherapy out of concern for recurrent irAE, even if they were enjoying a response to therapy. Additionally, there is a possibility that the use of steroids to combat irAE may actually dampen the anti-tumor effect in patients who otherwise might demonstrate a continued response to PD-1 blockade.

[0182] A LoSTIM or panel of LoSTIMs directed against a surface antigen(s) expressed on tissues susceptible to irAE would inhibit T cell activity on those tissues while allowing productive T cell activity to persist elsewhere, most importantly at sites of tumor. This is provided, of course, that the tumor does not express antigens that bind the LoSTIM. Moreover, a LoSTIM that inhibits the interaction of PD-1 with its natural ligands would simultaneously serve as a PD-1 antagonist on other tissues, including at the sites of tumor. An appropriately designed LoSTIM, therefore, might treat or prevent irAE while continuing to provide treatment for cancer. Such a LoSTIM or panel of LoSTIMs could also be used as an upfront alternative to existing PD-1/PDL1 inhibitors in patients at risk for irAE or in all patients.

### D. Treatment of Cancer: Engineered Immune Cell Therapy

[0183] Engineered immune cell therapy in the form of chimeric antigen receptor T cells (CAR-T) is a recent addition to the armamentarium of therapies for hematologic malignancies including Bcell lymphoma, acute lymphocytic leukemia, and multiple myeloma. Progress has been slow, however, to translate this technology to solid malignancies. One of the main barriers to the use of CAR-T for solid cancers are so-called “on-target, off-tumor” effects, whereby CAR-T cells attack normal tissues that express the tumor-associated antigen targeted by the CAR.

[0184] Normal tissues that express the tumor-associated antigen target by the CAR could be protected by a LoSTIM or panel of LoSTIMs directed against surface antigens on those tissues. As long as the antigens to which the LoSTIM binds are not expressed on the cancer, the activity of the CAR-T against the tumor would be preserved. The LoSTIMs could be administered exogenously as a pharmaceutical agent or be expressed by the CAR-T cells themselves. Moreover, it has been shown that PD-1 blockade may enhance the activity of CAR-T cells against cancer. Therefore, LoSTIMs that block the interaction of PD-1 with its natural ligands could be used to potentiate the effect of the CAR-T cells against the cancer.

### E. Treatment of Cancer: Graft-Versus-Host Disease and Bone Marrow Transplantation

[0185] Graft-versus-host disease (GVHD), in both the acute and chronic setting, is a complication of allogeneic bone marrow transplantation. The recognition of major and minor alloantigens by transplanted T cells mediates this phenomenon, but it also mediates the so-called “graftversus- leukemia” (GVL) effect in which these lymphocytes attack residual leukemia cells, thus providing the majority of the long-term survival benefit of allogeneic transplants. There has been considerable effort to develop agents or methods to enhance the GVL effect while simultaneously dampening GVHD, but since these effects are likely mediated by the same lymphocytes, this remains an ongoing challenge for the field.

[0186] A LoSTIM or panel of LoSTIMs directed against surface antigens expressed on normal tissues susceptible to GVHD could treat or prevent GVHD. Importantly, and in contrast to existing immunosuppressive agents, the LoSTIM would preserve the GVL effect, as long as the LoSTIM does not bind to antigens on the cancerous cells. In fact, a LoSTIM that blocks the interaction of PD-1 with its natural ligands may simultaneously potentiate the GVL effect while protecting normal tissues from GVHD.

### VII. Further Uses and Methods of the Invention

[0187] The antibodies, immunoglobulins, polypeptides, and nucleic acids of the present invention described herein may be used in numerous predictive medicine assays (e.g., diagnostic assays, prognostic assays, and monitoring clinical trials) and, in some embodiments and may be useful for therapeutic purposes (e.g., therapeutic and prophylactic) either alone or when conjugated to toxic compounds or other therapeutics. The term “detection” as used herein includes qualitative and/or quantitative detection (measuring levels) with or without reference to a control. As described herein, some antibodies or fragments thereof of the present invention have one or more of the following activities: 1) bind to and/or modulate the activity of their natural binding partner(s), such as PD-L1 or PD-L2; 2) modulate intra- or intercellular signaling, such as co-immunoinhibitory signaling; 3) modulate activation and/or proliferation of lymphocytes; 4) modulate the immune response of an organism, e.g., a mammalian organism, such as a mouse or human; and 5) modulate immune cell anergy.

[0188] Thus, one aspect of the present invention relates to diagnostic assays for determining polypeptide levels in the context of a biological sample (e.g., blood, serum, cells, or tissue) to thereby determine the level of the polypeptide in the sample, to determine whether an individual is afflicted with a disorder and/or to determine the state of such a disorder, indicated by such levels.

[0189] The present invention also provides for prognostic (or predictive) assays for determining whether an individual is at risk of developing such a disorder. Another aspect of the present invention pertains to monitoring the influence of agents (e.g., drugs, compounds) on the expression or activity of the detected polypeptides in clinical trials.

[0190] The present invention also provides for detection of PD-1 as a means to identify agents that transduce a PD-1 signal. Agents that transduce a PD-1 signal would attenuate immune responses and might be useful in autoimmune diseases, asthma, and for the establishment of tolerance.

[0191] In any method described herein, PD-1 may be detected either alone or in combination with the expression of other molecules, such as other immune checkpoint and/or costimulatory molecules. Combinatorial detection (e.g., sequentially or simultaneously) of several molecules may provide useful information regarding synergies of therapeutic intervention and/or personalized, higher-resolution diagnoses of disorder subtypes. In some embodiments, PD-1 is combinatorially detected with one more markers.

### A. Diagnostic Assays

[0192] The present invention provides, in part, methods, systems, and code for detecting levels of a polypeptide.

[0193] An exemplary method for detecting the level of a polypeptide involves obtaining a biological sample from a test subject and contacting the biological sample with an antibody or antigen-binding fragment thereof of the present invention capable of detecting the polypeptide such that the level of the polypeptide is detected in the biological sample. In some embodiments, at least one antibody or antigen-binding fragment thereof is used, wherein two, three, four, five, six, seven, eight, nine, ten, or more such antibodies or antibody fragments may be used in combination (e.g., in sandwich ELISAs) or in serial. In certain instances, the statistical algorithm is a single learning statistical classifier system. For example, a single learning statistical classifier system may be used to classify a sample as a PD-1 sample based upon a prediction or probability value and the presence or level of PD-1. The use of a single learning statistical classifier system typically classifies the sample as a PD-1 sample with a sensitivity, specificity, positive predictive value, negative predictive value, and/or overall accuracy of at least about 75%, 76%, 77%, 78%, 79%, 80%, 81%, 82%, 83%, 84%, 85%, 86%, 87%, 88%, 89%, 90%, 91%, 92%, 93%, 94%, 95%, 96%, 97%, 98%, or 99%.

[0194] Other suitable statistical algorithms are well known to those of skill in the art. For example, learning statistical classifier systems include a machine learning algorithmic technique capable of adapting to complex data sets (e.g., panel of markers of interest) and making decisions based upon such data sets. In some embodiments, a single learning statistical classifier system such as a classification tree (e.g., random forest) is used. In other embodiments, a combination of 2, 3, 4, 5, 6, 7, 8, 9, 10, or more learning statistical classifier systems are used, preferably in tandem. Examples of learning statistical classifier systems include, but are not limited to, those using inductive learning (e.g., decision/classification trees such as random forests, classification and regression trees (C&RT), boosted trees, etc.), Probably Approximately Correct (PAC) learning, connectionist learning (e.g., neural networks (NN), artificial neural networks (ANN), neuro fuzzy networks (NFN), network structures, perceptrons such as multi-layer perceptrons, multi-layer feed-forward networks, applications of neural networks, Bayesian learning in belief networks, etc.), reinforcement learning (e.g., passive learning in a known environment such as naive learning, adaptive dynamic learning, and temporal difference learning, passive learning in an unknown environment, active learning in an unknown environment, learning action-value functions, applications of reinforcement learning, etc.), and genetic algorithms and evolutionary programming. Other learning statistical classifier systems include support vector machines (e.g., Kernel methods), multivariate adaptive regression splines (MARS), Levenberg-Marquardt algorithms, Gauss-Newton algorithms, mixtures of Gaussians, gradient descent algorithms, and learning vector quantization (LVQ). In certain embodiments, the method of the present invention further comprises sending the PD-1 sample classification results to a clinician, e.g., a histopathologist or an oncologist.

[0195] In another embodiment, the method of the present invention further provides a diagnosis in the form of a probability that the individual has a condition or disorder associated with aberrant PD-1. For example, the individual may have about a 0%, 5%, 10%, 15%, 20%, 25%, 30%, 35%, 40%, 45%, 50%, 55%, 60%, 65%, 70%, 75%, 80%, 85%, 90%, 95%, or greater probability of having the condition or disorder. In yet another embodiment, the method of the present invention further provides a prognosis of the condition or disorder in the individual. In some instances, the method of classifying a sample as a PD-1 sample is further based on the symptoms (e.g., clinical factors) of the individual from which the sample is obtained. The symptoms or group of symptoms may be, for example, lymphocyte count, white cell count, erythrocyte sedimentation rate, diarrhea, abdominal pain, cramping, fever, anemia, weight loss, anxiety, depression, and combinations thereof. In some embodiments, the diagnosis of an individual as having a condition or disorder associated with aberrant PD-1 is followed by administering to the individual a therapeutically effective amount of a drug useful for treating one or more symptoms associated with the condition or disorder (e.g., chemotherapeutic agents).

[0196] In one embodiment, the methods further involve obtaining a control biological sample (e.g., biological sample from a subject who does not have a condition or disorder), a biological sample from the subject during remission or before developing a condition or disorder, or a biological sample from the subject during treatment for developing a condition or disorder.

[0197] An exemplary method for detecting the presence or absence of polypeptide or fragments thereof is an antibody of the present invention, or fragment thereof, capable of binding to a polypeptide, preferably an antibody with a detectable label. Antibodies may be polyclonal, or more preferably, monoclonal. Such agents may be labeled. The term “labeled”, with regard to the antibody, is intended to encompass direct labeling of the probe or antibody by coupling (i.e., physically linking) a detectable substance to the probe or antibody, as well as indirect labeling of the probe or antibody by reactivity with another reagent that is directly labeled. Examples of indirect labeling include detection of a primary antibody using a fluorescently labeled secondary antibody. The term “biological sample” is intended to include tissues, cells, and biological fluids isolated from a subject, such as serum, as well as tissues, cells, and fluids present within a subject. That is, the detection method of the present invention may be used to detect a polypeptide, or fragments thereof, in a biological sample in vitro as well as in vivo. In vitro techniques for detection of polypeptide include enzyme linked immunosorbent assays (ELISAs), Western blots, immunoprecipitations, immunohistochemistry (IHC), intracellular flow cytometry and related techniques, and immunofluorescence. Furthermore, in vivo techniques for detection of a polypeptide or a fragment thereof include introducing into a subject a labeled anti-polypeptide antibody. For example, the antibody may be labeled with a radioactive, luminescent, fluorescent, or other similar marker whose presence and location in a subject may be detected by standard imaging techniques, either alone or in combination with imaging for other molecules, such as markers of cell type (e.g., CD8+ T cell markers).

[0198] In one embodiment, the biological sample contains polypeptide molecules from the test subject. A preferred biological sample is a serum, tumor microenvironment, peritumoral, or intratumoral, isolated by conventional means from a subject.

[0199] In another embodiment, the methods further involve obtaining a control biological sample from a control subject, contacting the control sample with a compound or agent capable of detecting polypeptide, or fragments thereof, such that the presence of polypeptide, or fragments thereof, is detected in the biological sample, and comparing the presence of polypeptide, or fragments thereof, in the control sample with the presence of polypeptide, or fragments thereof in the test sample.

[0200] In still other embodiments, the antibodies may be associated with a component or device for the use of the antibodies in an ELISA or RIA. Non-limiting examples include antibodies immobilized on solid surfaces for use in these assays (e.g., linked and/or conjugated to a detectable label based on light or radiation emission as described above). In other embodiments, the antibodies are associated with a device or strip for detection of PD-1 by use of an immunochromatographic or immunochemical assay, such as in a “sandwich” or competitive assay, immunohistochemistry, immunofluorescence microscopy, and the like. Additional examples of such devices or strips are those designed for home testing or rapid point of care testing. Further examples include those that are designed for the simultaneous analysis of multiple analytes in a single sample. For example, an unlabeled antibody of the invention may be applied to a “capture” PD-1 polypeptides in a biological sample and the captured (or immobilized) PD-1 polypeptides may be bound to a labeled form of an anti-PD-1 antibody of the invention for detection. Other standard embodiments of immunoassays are well known the skilled artisan, including assays based on, for example, immunodiffusion, immunoelectrophoresis, immunohistopathology, immunohistochemistry, and histopathology.

### B. Prognostic Assays

[0201] The diagnostic methods described herein may furthermore be utilized to identify subjects having or at risk of developing a disorder. Aberrant expression or activity includes increased or decreased expression or activity, as well as expression or activity which does not follow the wild type developmental pattern of expression or the subcellular pattern of expression. For example, aberrant PD-1 levels is intended to include the cases in which a mutation in the PD-1 gene or regulatory sequence, or amplification of the chromosomal PD-1 gene, thereof causes the PD-1 gene to be under-expressed or over-expressed and situations in which such mutations result in a non-functional PD-1 polypeptide or a polypeptide which does not function in a wild-type fashion, e.g., a polypeptide missing an intracellular domain and thus not able to interact with a PD-1 binding or signal partner. As used herein, the term “unwanted” includes an unwanted phenomenon involved in a biological response such as immune cell activation. For example, the term unwanted includes a PD-1 variant which is undesirable in a subject.

[0202] Many disorders associated with aberrant PD-1 are known to the skilled artisan, as explained further in the rest of the disclosure. PD-1 is expressed by multiple tumor types, including select lymphoid malignancies, virally-induced cancers, and many solid tumors. However, immunoinhibition is desired for downregulating immune responses in treating a number of disorders, such as autoimmune diseases, inflammatory diseases, and the like.

[0203] The assays described herein, such as the preceding diagnostic assays or the following assays, may be utilized to identify a subject having or at risk of developing a disorder associated with a misregulation of PD-1 activation. Thus, the present invention provides a method for identifying a disorder associated with aberrant or unwanted PD-1 activation in which a test sample is obtained from a subject and a PD-1 level is detected, wherein the presence of an uberrant or unwanted PD-1 polypeptide is diagnostic for a subject having or at risk of developing the disorder associated with aberrant or unwanted PD-1 activity. As used herein, a “test sample” refers to a biological sample obtained from a subject of interest. For example, a test sample may be a biological fluid (e.g., cerebrospinal fluid or serum), cell sample, or tissue, such as a histopathological slide of the tumor microenvironment, peritumoral area, and/or intratumoral area.

[0204] Furthermore, the prognostic assays described herein may be used to determine whether a subject may be administered an agent (e.g., an agonist, antagonist, peptidomimetic, polypeptide, peptide, nucleic acid, small molecule, or other drug candidate) to treat such a disorder associated with aberrant or unwanted PD-1 activity. For example, such methods may be used to determine whether a subject may be effectively treated with one or a combination of agents. Thus, the present invention provides methods for determining whether a subject may be effectively treated with one or more agents for treating a disorder associated with aberrant or unwanted PD-1 activation.

[0205] The methods described herein may be performed, for example, by utilizing prepackaged diagnostic kits comprising at least one antibody reagent described herein, which may be conveniently used, e.g., in clinical settings to diagnose patients exhibiting symptoms or family history of a disease or illness involving PD-1.

[0206] Furthermore, any cell type or tissue in which PD-1 is expressed may be utilized in the prognostic assays described herein.

[0207] Another aspect of the present invention includes uses of the compositions and methods described herein for association and/or stratification analyses in which PD-1 in biological samples from individuals with a disorder associated with aberrant PD-1 activation, are analyzed and the information is compared to that of controls (e.g., individuals who do not have the disorder; controls may be also referred to as “healthy” or “normal” individuals or at early timepoints in a given time lapse study) who are preferably of similar age and race. The appropriate selection of patients and controls is important to the success of association and/or stratification studies. Therefore, a pool of individuals with well-characterized phenotypes is extremely desirable. Criteria for disease diagnosis, disease predisposition screening, disease prognosis, determining drug responsiveness (pharmacogenomics), drug toxicity screening, etc. are described herein.

[0208] Different study designs may be used for genetic association and/or stratification studies (Modern Epidemiology, Lippincott Williams & Wilkins (1998), 609-622). Observational studies are most frequently carried out in which the response of the patients is not interfered with. The first type of observational study identifies a sample of persons in whom the suspected cause of the disease is present and another sample of persons in whom the suspected cause is absent, and then the frequency of development of disease in the two samples is compared. These sampled populations are called cohorts, and the study is a prospective study. The other type of observational study is case-control or a retrospective study. In typical case-control studies, samples are collected from individuals with the phenotype of interest (cases) such as certain manifestations of a disease, and from individuals without the phenotype (controls) in a population (target population) that conclusions are to be drawn from. Then the possible causes of the disease are investigated retrospectively. As the time and costs of collecting samples in case-control studies are considerably less than those for prospective studies, case-control studies are the more commonly used study design in genetic association studies, at least during the exploration and discovery stage.

[0209] After all relevant phenotypic and/or genotypic information has been obtained, statistical analyses are carried out to determine if there is any significant correlation between the presence of an allele or a genotype with the phenotypic characteristics of an individual. Preferably, data inspection and cleaning are first performed before carrying out statistical tests for genetic association. Epidemiological and clinical data of the samples may be summarized by descriptive statistics with tables and graphs well known in the art. Data validation is preferably performed to check for data completion, inconsistent entries, and outliers. Chi-squared tests and t-tests (Wilcoxon rank-sum tests if distributions are not normal) may then be used to check for significant differences between cases and controls for discrete and continuous variables, respectively.

[0210] An important decision in the performance of genetic association tests is the determination of the significance level at which significant association may be declared when the p-value of the tests reaches that level. In an exploratory analysis where positive hits will be followed up in subsequent confirmatory testing, an unadjusted p-value <0.2 (a significance level on the lenient side), for example, may be used for generating hypotheses for significant association of a PD-1 level with certain phenotypic characteristics of a disease. It is preferred that a p-value <0.05 (a significance level traditionally used in the art) is achieved in order for the level to be considered to have an association with a disease. When hits are followed up in confirmatory analyses in more samples of the same source or in different samples from different sources, adjustment for multiple testing will be performed as to avoid excess number of hits while maintaining the experiment-wise error rates at 0.05. While there are different methods to adjust for multiple testing to control for different kinds of error rates, a commonly used but rather conservative method is Bonferroni correction to control the experiment-wise or family-wise error rate (Multiple comparisons and multiple tests, Westfall et al, SAS Institute (1999)). Permutation tests to control for the false discovery rates, FDR, may be more powerful (Benjamini and Hochberg, Journal of the Royal Statistical Society, Series B 57, 1289-1300, 1995, Resampling-based Multiple Testing, Westfall and Young, Wiley (1993)). Such methods to control for multiplicity would be preferred when the tests are dependent and controlling for false discovery rates is sufficient as opposed to controlling for the experiment-wise error rates.

[0211] Once individual risk factors, genetic or non-genetic, have been found for the predisposition to disease, a classification/prediction scheme may be set up to predict the category (for instance, disease or no-disease) that an individual will be in depending on his phenotype and/or genotype and other non-genetic risk factors. Logistic regression for discrete trait and linear regression for continuous trait are standard techniques for such tasks (Applied Regression Analysis, Draper and Smith, Wiley (1998)). Moreover, other techniques may also be used for setting up classification. Such techniques include, but are not limited to, MART, CART, neural network, and discriminant analyses that are suitable for use in comparing the performance of different methods (The Elements of Statistical Learning, Hastie, Tibshirani & Friedman, Springer (2002)).

### C. Monitoring of Effects During Clinical Trials

[0212] Monitoring the influence of agents (e.g., compounds, drugs or small molecules) on the levels of a PD-1 polypeptide or a fragment thereof (e.g., the modulation of cell proliferation and/or migration) may be applied not only in basic drug screening, but also in clinical trials. For example, the effectiveness of an agent determined by a screening assay as described herein to decrease PD-1 gene expression, polypeptide levels, or downregulate PD-1 activity, may be monitored in clinical trials of subjects exhibiting decreased PD-1 gene expression, polypeptide levels, or downregulated PD-1 activity, or may be monitored in clinical trails of subjects exhibiting decreased PD-1 levels, detectable by the anti-PD-1 antibodies or fragments described herein. In such clinical trials, the expression or activity of a PD-1 gene and/or symptoms or markers of the disorder of interest, may be used as a “read out” or marker of the phenotype of a particular cell, tissue, or system. Similarly, the effectiveness of an agent determined by a screening assay as described herein to increase PD-1 gene expression, polypeptide levels, or increase PD-1 activity, may be monitored in clinical trials of subjects exhibiting increased PD-1 gene expression, polypeptide levels, or increased PD-1 activity. In such clinical trials, the expression or activity of a PD-1 gene and/or symptoms or markers of the disorder of interest, may be used as a “read out” or marker of the phenotype of a particular cell, tissue, or system, such as for an autoimmune disorder.

[0213] For example, and not by way of limitation, genes, including PD-1, that are modulated in cells by treatment with an agent (e.g., compound, drug or small molecule) which modulates PD-1 activity (e.g., identified in a screening assay as described herein) may be identified. Thus, to study the effect of agents on a disorder associated with aberrant PD-1 activation, for example, in a clinical trial, cells may be isolated and nucleic acids and/or protein prepared and analyzed for the levels of PD-1 and/or other genes implicated in the disorder associated with aberrant PD-1 activation. The levels of gene expression (e.g., a gene expression pattern) analyzed by measuring the amount of polypeptide produced, by one of the methods as described herein, or by measuring the levels of PD-1 or other genes. In this way, the gene expression pattern may serve as a marker, indicative of the physiological response of the cells to the agent. Accordingly, this response state may be determined before, and at various points during treatment of the individual with the agent.

[0214] In a preferred embodiment, the present invention provides a method for monitoring the effectiveness of treatment of a subject with an agent (e.g., an agonist, antagonist, peptidomimetic, polypeptide, peptide, nucleic acid, small molecule, or other drug candidate identified by the screening assays described herein) including the steps of (i) obtaining a pre-administration sample from a subject prior to administration of the agent; (ii) detecting the level of PD-1 polypeptides, or fragments thereof, in the preadministration sample; (iii) obtaining one or more post-administration samples from the subject; (iv) detecting the level of PD-1 polypeptides, or fragments thereof, in the post-administration samples; (v) comparing the level of the PD-1 polypeptide, or fragments thereof, in the pre-administration sample with the PD-1 polypeptide in the post administration sample or samples; and (vi) altering the administration of the agent to the subject accordingly. For example, increased administration of the agent may be desirable to decrease the PD-1 to lower levels than detected, i.e., to increase the effectiveness of the agent. According to such an embodiment, PD-1 levels may be used as an indicator of the effectiveness of an agent, even in the absence of an observable phenotypic response. Similarly, PD-1 level analysis, such as by immunohistochemistry (IHC), may also be used to select patients who will receive PD-1 and/or PD-1 immunotherapy, or immunotherapy to inhibit one ore more immune checkpoints. Patients whose tumors having PD-1 activation are more likely to respond to PD-1 or PD-1 mAb immunotherapy, as describd herein. The immunotherapy will initially result in immune activation and the activated T cells will express IFN-gamma which in turn will upregulate PD-1 activation. Normally this would result in PD-1 engagement and down regulation of the immune response.

### D. Therapeutic Methods and Uses

[0215] In some embodiments, antibodies, fragments or immunoconjugates of the present invention (e.g., anti-PD-1 antibodies alone or conjugated to therapeutic moieties) are useful for treating any disorder (e.g., a cancer) associated with aberrant or undesired activation of PD-1. In certain embodiments, the treatment is of a mammal, such as a human. Such antibodies of the invention may be used alone or in combination with any suitable agent or appropriate therapy to treat the disorder of interest.

[0216] It is well known that therapeutic monoclonal antibodies may lead to the depletion of cells extracellularly bearing the antigen specifically recognized by the antibody. This depletion may be mediated through at least three mechanisms: antibody mediated cellular cytotoxicity (ADCC), complement dependent lysis, and direct anti-tumour inhibition of tumour growth through signals given via the antigen targeted by the antibody.

[0217] “Complement dependent cytotoxicity” or “CDC” refers to the lysis of a target cell in the presence of complement. Activation of the classical complement pathway is initiated by the binding of the first component of the complement system to antibodies which are bound to their cognate antigen. To assess complement activation, a CDC assay, e.g. as described in Gazzano-Santoro et al. (1997) may be performed.

[0218] “Antibody-dependent cell-mediated cytotoxicity” or “ADCC” refers to a form of cytotoxicity in which secreted antibodies bound onto Fc receptors (FcRs) present on certain cytotoxic cells (e.g. Natural Killer (NK) cells, neutrophils, and macrophages) enable these cytotoxic effector cells to bind specifically to an antigen-bearing target cell and subsequently kill the target cell. To assess ADCC activity of a molecule of interest, an in vitro ADCC assay, such as that described in U.S. Pat. No. 5,500,362 or 5,821,337 may be performed. As is well known in the art, the Fc portions may be engineered to effect a desired interaction or lack thereof with Fc receptors.

[0219] For antibody-mediated binding, neutralization, and/or modulation of intracellular targets, certain modifications should be made. As described herein, certain antibody formats, such as sFvs and Fabs, are amenable to intracellular expression of antibody-like molecules. Methods of rmaking and using such adapted antibody-like molecules for targeting expression in different compartments of the cell, including the nucleus, ER, cytoplasm, golgi, plasma membrane, mitochondria, where they counteract antigens or molecules in a specific pathway, are well known (see, at least U.S. Pat. Publs. 2008-0233110 and 2003-0104402; Marasco et al. (1993) Proc. Natl. Acad. Sci. U.S.A. 90:7889-7893; Chen et al. (1994) Human Gene Therapy 5:595-601; Chen et al. (1994) Proc. Natl. Acad. Sci. U.S.A. 91:5932-5936; Mhashilkar et al. (1995) EMBO J. 14:1542-1551; Marasco et al. (1997) Gene Therapy 4:11-15; Richardson et al. (1995) Proc. Natl. Acad. Sci. U.S.A. 92:3137-3141; and Duan et al. (1994) Human Gene Therapy 5:1315-1324).

[0220] As used herein, the term “intracellular immunoglobulin molecule” is a complete immunoglobulin which is the same as a naturally-occurring secreted immunoglobulin, but which remains inside of the cell following synthesis. An “intracellular immunoglobulin fragment” refers to any fragment, including single-chain fragments of an intracellular immunoglobulin molecule. Thus, an intracellular immunoglobulin molecule or fragment thereof is not secreted or expressed on the outer surface of the cell. Single-chain intracellular immunoglobulin fragments are referred to herein as “single-chain immunoglobulins.” As used herein, the term “intracellular immunoglobulin molecule or fragment thereof” is understood to encompass an “intracellular immunoglobulin,” a “single-chain intracellular immunoglobulin” (or fragment thereof), an “intracellular immunoglobulin fragment,” an “intracellular antibody” (or fragment thereof), and an “intrabody” (or fragment thereof). As such, the terms “intracellular immunoglobulin,” “intracellular Ig,” “intracellular antibody,” and “intrabody” may be used interchangeably herein, and are all encompassed by the generic definition of an “intracellular immunoglobulin molecule, or fragment thereof.” An intracellular immunoglobulin molecule, or fragment thereof of the present invention may, in some embodiments, comprise two or more subunit polypeptides, e.g., a “first intracellular immunoglobulin subunit polypeptide” and a “second intracellular immunoglobulin subunit polypeptide.” However, in other embodiments, an intracellular immunoglobulin may be a “single-chain intracellular immunoglobulin” including only a single polypeptide. As used herein, a “single-chain intracellular immunoglobulin” is defined as any unitary fragment that has a desired activity, for example, intracellular binding to an antigen. Thus, single-chain intracellular immunoglobulins encompass those which comprise both heavy and light chain variable regions which act together to bind antigen, as well as single-chain intracellular immunoglobulins which only have a single variable region which binds antigen, for example, a “camelized” heavy chain variable region as described herein. An intracellular immunoglobulin or Ig fragment may be expressed anywhere substantially within the cell, such as in the cytoplasm, on the inner surface of the cell membrane, or in a subcellular compartment (also referred to as cell subcompartment or cell compartment) such as the nucleus, golgi, endoplasmic reticulum, endosome, mitochondria, etc. Additional cell subcompartments include those that are described herein and well known in the art.

[0221] Such intracellular immunoglobulins are expressed in a recipient cell or host cell containing the antigen to be targeted. A host cell of the present invention is preferably a eukaryotic cell or cell line, preferably a plant, animal, vertebrate, mammalian, rodent, mouse, primate, or human cell or cell line. The effects of modulating PD-1 signaling are well known in the art (see, for example, PCT Publ. WO 2001/014557).

[0222] In some embodiments, antibodies of the present invention may be conjugated to a therapeutic moiety, such as a growth inhibitory agent, cytotoxic agent, or a prodrug-activating enzyme as previously described. Antibodies of the invention may be useful for targeting said growth inhibitory agent, cytotoxic agent, or a prodrug to a cell that under- or over-expresses the desired amount of PD-1.

[0223] Thus, an object of the invention relates to a method for treating a disorder associated with aberrant PD-1 activation comprising administering a subject in need thereof with a therapeutically effective amount of an antibody, fragment or immunoconjugate of the present invention.

[0224] Alternatively, in some embodiments, the antibodies or the antigen-binding fragments of the present invention are useful for therapeutic applications, in addition to diagnostic, prognostic, and prevention applications regarding upregulating an immune response. Upregulation of immune responses may be in the form of enhancing an existing immune response or eliciting an initial immune response. For instance, enhancing an immune response using the subject compositions and methods is useful in cases of improving an immunological defense against cancer and infections with microbes (e.g., bacteria, viruses, or parasites). For example, upregulation or enhancement of an immune response function, as described herein, is useful in the induction of tumor immunity.

[0225] In another embodiment, the immune response may be stimulated by the methods described herein, such that preexisting tolerance, clonal deletion, and/or exhaustion (e.g., T cell exhaustion) is overcome. For example, immune responses against antigens to which a subject cannot mount a significant immune response, e.g., to an autologous antigen, such as a tumor specific antigens may be induced by administering appropriate agents described herein that upregulate the immune response. In one embodiment, an autologous antigen, such as a tumor-specific antigen, may be co-administered. In another embodiment, an immune response may be stimulated against an antigen (e.g., an autologous antigen) to treat a neurological disorder. In another embodiment, the subject agents may be used as adjuvants to boost responses to foreign antigens in the process of active immunization.

[0226] In certain instances, it may be desirable to further administer other agents that upregulate immune responses, for example, forms of other B7 family members that transduce signals via costimulatory receptors, in order to further augment the immune response. Also, agents that upregulate an immune response may be used prophylactically in vaccines against various polypeptides (e.g., polypeptides derived from pathogens). Immunity against a pathogen (e.g., a virus) may be induced by vaccinating with a viral protein along with an agent that upregulates an immune response, in an appropriate adjuvant.

[0227] Alternatively, in some embodiments, the antibodies and the antigen-binding fragments of the present invention are useful for therapeutic applications, in addition to diagnostic, prognostic, and prevention applications (such as treating, and delaying the onset or progression of the diseases), to inhibit diseases that upregulate the immune reaction, for example, asthma, autoimmune diseases (glomerular nephritis, arthritis, dilated cardiomyopathy-like disease, ulceous colitis, Sjogren syndrome, Crohn disease, systemic erythematodes, chronic rheumatoid arthritis, multiple sclerosis, psoriasis, allergic contact dermatitis, polymyosiis, pachyderma, periarteritis nodosa, rheumatic fever, vitiligo vulgaris, insulin dependent diabetes mellitus, Behcet disease, Hashimoto disease, Addison disease, dermatomyositis, myasthenia gravis, Reiter syndrome, Graves’ disease, anaemia perniciosa, Goodpasture syndrome, sterility disease, chronic active hepatitis, pemphigus, autoimmune thrombopenic purpura, and autoimmune hemolytic anemia, active chronic hepatitis, Addison’s disease, anti-phospholipid syndrome, atopic allergy, autoimmune atrophic gastritis, achlorhydra autoimmune, celiac disease, Cushing’s syndrome, dermatomyositis, discoid lupus, erythematosis, Goodpasture’s syndrome, Hashimoto’s thyroiditis, idiopathic adrenal atrophy, idiopathic thrombocytopenia, insulin-dependent diabetes, Lambert-Eaton syndrome, lupoid hepatitis, some cases of lymphopenia, mixed connective tissue disease, pemphigoid, pemphigus vulgaris, pernicious anema, phacogenic uveitis, polyarteritis nodosa, polyglandular autosyndromes, primary biliary cirrhosis, primary sclerosing cholangitis, Raynaud’s syndrome, relapsing polychondritis, Schmidt’s syndrome, limited scleroderma (or crest syndrome), sympathetic ophthalmia, systemic lupus erythematosis, Takayasu’s arteritis, temporal arteritis, thyrotoxicosis, type b insulin resistance, ulcerative colitis and Wegener’s granulomatosis).

[0228] Similarly, the antibodies and the antigen-binding fragments of the present invention are useful for therapeutic applications, in addition to diagnostic, prognostic, and prevention applications (such as treating, and delaying the onset or progression of the diseases) for persistent infectious disease (e.g., viral infectious diseases including HPV, HBV, hepatitis C Virus (HCV), retroviruses such as human immunodeficiency virus (HIV-1 and HIV-2), herpes viruses such as Epstein Barr Virus (EBV), cytomegalovirus (CMV), HSV-1 and HSV-2, and influenza virus. Other antigens associated with pathogens that may be used as described herein are antigens of various parasites, includes malaria, preferably malaria peptide based on repeats of NANP. In addition, bacterial, fungal and other pathogenic diseases are included, such as Aspergillus, Brugia, Candida, Chlamydia, Coccidia, Cryptococcus, Dirofilaria, Gonococcus, Histoplasma, Leishmania, Mycobacterium, Mycoplasma, Paramecium, Pertussis, Plasmodium, Pneumococcus, Pneumocystis, Rickettsia, Salmonella, Shigella, Staphylococcus, Streptococcus, Toxoplasma and Vibriocholerae. Exemplary species include Neisseria gonorrhea, Mycobacterium tuberculosis, Candida albicans, Candida tropicalis, Trichomonas vaginalis, Haemophilus vaginalis, Group B Streptococcus sp., Microplasma hominis, Hemophilus ducreyi, Granuloma inguinale, Lymphopathia venereum, Treponema pallidum, Brucella abortus. Brucella melitensis, Brucella suis, Brucella canis, Campylobacter fetus, Campylobacter fetus intestinalis, Leptospira pomona, Listeria monocytogenes, Brucella ovis, Chlamydia psittaci, Trichomonas foetus, Toxoplasma gondii, Escherichia coli, Actinobacillus equuli, Salmonella abortus ovis, Salmonella abortus equi, Pseudomonas aeruginosa, Corynebacterium equi, Corynebacterium pyogenes, Actinobaccilus seminis, Mycoplasma bovigenitalium, Aspergillus fumigatus, Absidia ramosa, Trypanosoma equiperdum, Babesia caballi, Clostridium tetani, Clostridium botulinum; or, a fungus, such as, e.g., Paracoccidioides brasiliensis; or other pathogen, e.g., Plasmodium falciparum. Also included are National Institute of Allergy and Infectious Diseases (NIAID) priority pathogens. These include Category A agents, such as variola major (smallpox), Bacillus anthracis (anthrax), Yersinia pestis (plague), Clostridium botulinum toxin (botulism), Francisella tularensis (tularaemia), filoviruses (Ebola hemorrhagic fever, Marburg hemorrhagic fever), arenaviruses (Lassa (Lassa fever), Junin (Argentine hemorrhagic fever) and related viruses); Category B agents, such as Coxiella burnetti (Q fever), Brucella species (brucellosis), Burkholderia mallei (glanders), alphaviruses (Venezuelan encephalomyelitis, eastern & western equine encephalomyelitis), ricin toxin from Ricinus communis (castor beans), epsilon toxin of Clostridium perfringens; Staphylococcus enterotoxin B, Salmonella species, Shigella dysenteriae, Escherichia coli strain 0157:H7, Vibrio cholerae, Cryptosporidium parvum; Category C agents, such as nipah virus, hantaviruses, tickborne hemorrhagic fever viruses, tickborne encephalitis viruses, yellow fever, and multidrug-resistant tuberculosis; helminths, such as Schistosoma and Taenia; and protozoa, such as Leishmania (e.g., L. mexicana) and Plasmodium.

[0229] In still another embodiment, the antibodies or the antigen-binding fragments of the present invention are useful for therapeutic applications, in addition to diagnostic, prognostic, and prevention applications regarding induction of immunological tolerance, organ graft rejection, graft-versus-host disease (GVHD), allergic disease, and diseases caused by attenuation of immune reactions mediated by PD-1.

[0230] In the context of the invention, the term “treating” or “treatment”, as used herein, means reversing, alleviating, inhibiting the progress of, or preventing the disorder or condition to which such term applies, or one or more symptoms of such disorder or condition. By the term “treating cancer” as used herein is meant the inhibition of the growth and/or proliferation of cancer cells. Preferably such treatment also leads to the regression of tumor growth (i.e., the decrease in size of a measurable tumor). Most preferably, such treatment leads to the complete regression of the tumor.

[0231] In some embodiments, the term “patient” or “patient in need thereof” is intended for a human or non-human mammal affected or likely to be affected with a cancer associated with aberrant activation of PD-1.

[0232] By a “therapeutically effective amount” of the polypeptide of the invention is meant a sufficient amount of the antibody to treat the disorder of interest, such as cancer, at a reasonable benefit/risk ratio applicable to any medical treatment. It will be understood, however, that the total daily usage of the antibodies and compositions of the present invention will be decided by the attending physician within the scope of sound medical judgment. The specific therapeutically effective dose level for any particular patient will depend upon a variety of factors including the disorder being treated and the severity of the disorder; activity of the specific antibody employed; the specific composition employed, the age, body weight, general health, sex and diet of the patient; the time of administration, route of administration, and rate of excretion of the specific antibody employed; the duration of the treatment; drugs used in combination or coincidental with the specific polypeptide employed; and like factors well known in the medical arts. For example, it is well known within the skill of the art to start doses of the compound at levels lower than those required to achieve the desired therapeutic effect and to gradually increase the dosage until the desired effect is achieved.

[0233] Therapeutic formulations comprising one or more antibodies of the invention are prepared for storage by mixing the antibody having the desired degree of purity with optional physiologically acceptable carriers, excipients or stabilizers (Remington’s Pharmaceutical Sciences 16th edition, Osol, A. Ed. (1980)), in the form of lyophilized formulations or aqueous solutions. The antibody composition will be formulated, dosed, and administered in a fashion consistent with good medical practice. Factors for consideration in this context include the particular disorder being treated, the particular mammal being treated, the clinical condition of the individual patient, the cause of the disorder, the site of delivery of the agent, the method of administration, the scheduling of administration, and other factors known to medical practitioners.

[0234] The therapeutic dose may be at least about 0.01 µg/kg body weight, at least about 0.05 µg/kg body weight; at least about 0.1 µg/kg body weight, at least about 0.5 µg/kg body weight, at least about 1 µg/kg body weight, at least about 2.5 µg/kg body weight, at least about 5 µg/kg body weight, and not more than about 100 µg/kg body weight. It will be understood by one of skill in the art that such guidelines will be adjusted for the molecular weight of the active agent, e.g. in the use of antibody fragments, or in the use of antibody conjugates. The dosage may also be varied for localized administration, e.g. intranasal, inhalation, etc., or for systemic administration, e.g. i.m., i.p., i.v., and the like.

[0235] The composition need not be, but is optionally formulated with one or more agents that potentiate activity, or that otherwise increase the therapeutic effect. These are generally used in the same dosages and with administration routes as used hereinbefore or about from 1 to 99% of the heretofore employed dosages.

[0236] Acceptable carriers, excipients, or stabilizers are non-toxic to recipients at the dosages and concentrations employed, and include buffers such as phosphate, citrate, and other organic acids; antioxidants including ascorbic acid and methionine; preservatives (such as octadecyldimethylbenzyl ammonium chloride; hexamethonium chloride; benzalkonium chloride, benzethonium chloride; phenol, butyl or benzyl alcohol; alkyl parabens such as methyl or propyl paraben; catechol; resorcinol; cyclohexanol; 3-pentanol; and m-cresol); low molecular weight (less than about 10 residues) polypeptides; proteins, such as serum albumin, gelatin, or immunoglobulins; hydrophilic polymers such as polyvinylpyrrolidone; amino acids such as glycine, glutamine, asparagine, histidine, arginine, or lysine; monosaccharides, disaccharides, and other carbohydrates including glucose, mannose, or dextrins; chelating agents such as EDTA; sugars such as sucrose, mannitol, trehalose or sorbitol; salt-forming counter-ions such as sodium; metal complexes (e.g., Zn-protein complexes); and/or non-ionic surfactants such as TWEEN™, PLURONICS™ or polyethylene glycol (PEG). Formulations to be used for in vivo administration should be sterile. This is readily accomplished by filtration through sterile filtration membranes.

[0237] The active ingredients may also be entrapped in microcapsule prepared, for example, by coacervation techniques or by interfacial polymerization, for example, hydroxymethylcellulose or gelatin-microcapsule and poly-(methylmethacylate) microcapsule, respectively, in colloidal drug delivery systems (for example, liposomes, albumin microspheres, microemulsions, nano-particles and nanocapsules) or in macroemulsions. Such techniques are disclosed in Remington’s Pharmaceutical Sciences 16th edition, Osol, A. Ed. (1980).

[0238] The compositions described herein may be administered by any suitable means, including parenteral, subcutaneous, intraperitoneal, intrapulmonary, and intranasal. Parenteral infusions include intramuscular, intravenous, intraarterial, intraperitoneal, or subcutaneous administration. In addition, the compositions may be suitably administered by pulse infusion, particularly with declining doses of the antibody.

[0239] For the prevention or treatment of disease, the appropriate dosage of antibody will depend on the type of disease to be treated, as defined above, the severity and course of the disease, whether the antibody is administered for preventive purposes, previous therapy, the patient’s clinical history and response to the antibody, and the discretion of the attending physician. The antibody is suitably administered to the patient at one time or over a series of treatments.

### E. Assays and Screening Methods

[0240] Another aspect of the present invention relates to screening assays, including non-cell based assays and xenograft animal model assays. In one embodiment, the assays provide a method for identifying agents that modulate PD-1 signaling, such as in a human or an animal model assay, in order to identify agents that reduce PD-1 signaling thereby increasing immune responses and/or identify agents that increase PD-1 signaling thereby decreasing immune responses.

[0241] In one embodiment, the present invention relates to assays for screening test agents which bind to, or modulate the biological activity of, at least one biomarker described herein (e.g., in the tables, figures, examples, or otherwise in the specification), such as PD-1. In one embodiment, a method for identifying such an agent entails determining the ability of the agent to modulate, e.g. inhibit, the at least one biomarker described herein.

[0242] In one embodiment, an assay is a cell-free or cell-based assay, comprising contacting at least one biomarker described herein, with a test agent, and determining the ability of the test agent to modulate (e.g., inhibit) the enzymatic activity of the biomarker, such as by measuring direct binding of substrates or by measuring indirect parameters as described below.

[0243] For example, in a direct binding assay, biomarker protein (or their respective target polypeptides or molecules) may be coupled with a radioisotope or enzymatic label such that binding may be determined by detecting the labeled protein or molecule in a complex. For example, the targets may be labeled with ¹²⁵I, ³⁵S, ¹⁴C, or ³H, either directly or indirectly, and the radioisotope detected by direct counting of radioemmission or by scintillation counting. Alternatively, the targets may be enzymatically labeled with, for example, horseradish peroxidase, alkaline phosphatase, or luciferase, and the enzymatic label detected by determination of conversion of an appropriate substrate to product. Determining the interaction between biomarker and substrate may also be accomplished using standard binding or enzymatic analysis assays. In one or more embodiments of the above described assay methods, it may be desirable to immobilize polypeptides or molecules to facilitate separation of complexed from uncomplexed forms of one or both of the proteins or molecules, as well as to accommodate automation of the assay.

[0244] Binding of a test agent to a target may be accomplished in any vessel suitable for containing the reactants. Non-limiting examples of such vessels include microtiter plates, test tubes, and micro-centrifuge tubes. Immobilized forms of the antibodies described herein may also include antibodies bound to a solid phase like a porous, microporous (with an average pore diameter less than about one micron) or macroporous (with an average pore diameter of more than about 10 microns) material, such as a membrane, cellulose, nitrocellulose, or glass fibers; a bead, such as that made of agarose or polyacrylamide or latex; or a surface of a dish, plate, or well, such as one made of polystyrene.

[0245] In an alternative embodiment, determining the ability of the agent to modulate the interaction between the biomarker and a substrate or a biomarker and its natural binding partner may be accomplished by determining the ability of the test agent to modulate the activity of a polypeptide or other product that functions downstream or upstream of its position within the signaling pathway (e.g., feedback loops). Such feedback loops are well-known in the art (see, for example, Chen and Guillemin (2009) Int. J. Tryptophan Res. 2:1-19).

[0246] The present invention further pertains to novel agents identified by the above-described screening assays. Accordingly, it is within the scope of this invention to further use an agent identified as described herein, such as in an appropriate animal model. For example, an agent identified as described herein may be used in an animal model to determine the efficacy, toxicity, or side effects of treatment with such an agent. Alternatively, an antibody identified as described herein may be used in an animal model to determine the mechanism of action of such an agent.

### VIII. Kits

[0247] In addition, the present invention also encompasses kits for detecting the presence of a PD-1 polypeptide, or fragments thereof, in a biological sample. For example, the kit may comprise a labeled compound or agent capable of detecting a PD-1 polypeptide, or fragments thereof, in a biological sample; means for determining the amount of the PD-1 polypeptide, or fragments thereof, in the sample; and means for comparing the amount of the PD-1 polypeptide, or fragments thereof, in the sample with a standard. The compound or agent may be packaged in a suitable container. For example, the present invention provides kits comprising at least one antibody described herein. Kits containing antibodies of the invention find use in detecting PD-1, or in therapeutic or diagnostic assays. Kits of the invention may contain an antibody coupled to a solid support, e.g., a tissue culture plate or beads (e.g., sepharose beads).

[0248] A kit may include additional components to facilitate the particular application for which the kit is designed. For example, kits may be provided which contain antibodies for detection and quantification of PD-1 in vitro, e.g. in an ELISA or a Western blot. Additional, exemplary agents that kits may contain include means of detecting the label (e.g., enzyme substrates for enzymatic labels, filter sets to detect fluorescent labels, appropriate secondary labels such as a sheep anti-mouse-HRP, etc.) and reagents necessary for controls (e.g., control biological samples or PD-1 protein standards). A kit may additionally include buffers and other reagents recognized for use in a method of the disclosed invention. Non-limiting examples include agents to reduce non-specific binding, such as a carrier protein or a detergent. A kit of the present invention may also include instructional materials disclosing or describing the use of the kit or an antibody of the disclosed invention in a method of the disclosed invention as provided herein.

[0249] This invention is further illustrated by the following examples which should not be construed as limiting. The contents of all references, patents and published patent applications cited throughout this application, as well as the Figures, are incorporated herein by reference.

### EXAMPLES

### Example 1: Selective Modulation of T Cell Activity Using Bispecific Molecules That Engage PD-1 and Function as Either Agonists or Antagonists

[0250] Disclosed is a method of inhibiting T cell activity using bispecific molecules that act as PD-1 agonists. These molecules bind PD-1 on the T cell surface and also bind an antigen on the opposing surface of an adjacent cell. This bispecific interaction allows them to cluster PD-1 on the T cell surface and colocalizes this cluster with the immunological synapse, thereby activating PD-1 and inhibiting T cell activity. Engagement of the antigen on the target cell surface is necessary for these molecules to function as PD-1 agonists, and this property may be exploited to create molecules that function as selective PD-1 agonists that inhibit T cell activity on some tissues but not others. This category of a molecule is referred to herein as a Location-Specific T cell Inhibitory Molecule (LoSTIM). A LoSTIM may also be designed to block the engagement of PD-1 by its natural ligands, in which case it will act as an antagonist of PD-1 on T cells interacting with tissues that do not bind the LoSTIM, while still acting as an agonist of PD-1 on T cells interacting with tissues that do bind the LoSTIM. A single LoSTIM molecule of that design will, therefore, function as either a potentiator or inhibitor of T cell function depending on the tissue context. By contrast, a LoSTIM that does not block the engagement of PD-1 by its natural ligands will function exclusively as a cell-specific and/or tissue-specific inhibitor of T cell function.

[0251] A schematic overview of exemplary LoSTIMs is shown in FIG. 1A to FIG. 1C. FIG. 1A shows a schematic representation of a LoSTIM. A LoSTIM is a molecule capable of simultaneously binding to PD-1 as well as to an arbitrary cell-specific and/or tissue-specific surface antigen expressed on tissues where inhibition of T cell activity is desired. FIG. 1B shows that an embodiment of a LoSTIM simultaneously binds PD-1 molecules on a T cell as well as molecules of an antigen on the surface of an opposing somatic cell, thereby clustering PD-1 on the T cell surface in proximity to an immunologic synapse between the two cells. This clustering and co-localization of PD-1 inhibits T cell activation. FIG. 1C shows that an embodiment of a LoSTIM binds PD-1 on the T cell but does not bind an antigen on the opposing somatic cell surface since its cognate antigen is not expressed by that cell. Because the LoSTIM is not fixed in place by binding to the opposing cell surface, it is not able to cluster PD-1 or co-localize PD-1 with the immunologic synapse on the T cell surface and therefore does not inhibit T cell activation. In this circumstance, if the PD-1 binding domain of the LoSTIM inhibits the engagement of PD-1 by its natural ligands, the LoSTIM acts as a potentiator of T cell activation.

[0252] Four generalized LoSTIM designs were evaluated in the subsequent studies: (1) a PDL1-scFv fusion protein in which the scFv binds to a cell-specific and/or tissue-specific surface antigen expressed on tissues where T cell inhibition is desired; (2) a PDL1-mAb fusion in which the mAb is directed against a cell-specific and/or tissue-specific surface antigen expressed on tissues where T cell inhibition is desired; and (3) & (4), bispecific monoclonal antibodies with avidity for PD-1 and for a cell-specific and/or tissue-specific surface antigen expressed on tissues where T cell inhibition is desired. FIG. 2 shows schematics of LoSTIMs used in these studies. LoSTIMs 1 through 4 have bispecific avidity for Thy1.2 (CD90.2) and mouse PD-1. The anti-Thy1.2 binding domain is the variable region of the anti-Thy1.2 clone AF6 and the anti-PD-1 binding domain is via the variable region of anti-PD-1 clone 1A12. LoSTIMs 5 through 8 have bispecific avidity for H-2Kb (a C57B6 class I MHC allele) and mouse PD-1. The anti-H-2Kb binding domain is the variable region of the anti-H-2Kb clone AF6. It should be noted that the anti-PD-1 clone 1A12 is known to block the interaction of PD-1 with its natural ligands and function as a PD-1 antagonist. The CH1, CH2, and CH3 domains of the antibody LoSTIMs contain several point mutations known to inhibit C1q and Fc gamma receptor binding, thus rendering these Fc domains “inert.”

[0253] The sequences of these LoSTIMs are presented in Example 2.

[0254] LoSTIM binding using these constructs was invenstigated, and some results are shown in FIG. 3A through FIG. 3D. As shown in FIG. 3A, 300-mPD-1 cells, transgenic mouse pro-B cells which overexpress mouse PD-1, were exposed to varying concentrations of LoSTIMs 2-4 and 6-8. Binding was detected via an anti-mIgG2a-PE conjugate. FIG. 3B shows data from panel A normalized to allow for a better assessment of relative PD-1 avidities. As shown in FIG. 3C, bone-marrow-derived dendritic cells (BMDCC) generated from C57B6 bone marrow cells cultured with GM-CSF for 8 days were exposed to varying concentrations of LoSTIMs 6-8. Binding was detected via an anti-mIgG2a-PE conjugate. As shown in FIG. 3D, BMDDC were exposed to varying concentrations of LoSTIMs 6-8. Bispecific binding was assessed by detecting the binding of a mouse PD-1-human Fc fusion protein. An anti-human IgG-PE conjugate was used as the detector.

[0255] Further results are provided in FIG. 4, which shows that OT-I T cell activation by SIINFEKL-pulsed bone-marrow-derived dendritic cells (BMDDC) is inhibited by LoSTIMs. C57B6 bone marrow cells were cultured with GM-CSF for 8 days to yield BMDDC. These BMDDC were pulsed with 10 micromolar of Ser-Ile-Ile-Asn-Phe-Glu-Lys-Leu (SIINFEKL) peptide for 6 hours, washed, then co-cultured with CFSE-labeled OT-I CD8a+ T cells, which express a recombinant TCR that recognizes SIINFEKL in the context of H-2Kb. These T cells were obtained via negative magnetic selection from OT-I mouse splenocytes. The co-cultures were treated with 0.5 micromolar of the anti- H-2Kb-directed LoSTIMs 5, 6, 7, or 8. Cells were co-cultured for 72 hours. The histograms presented above represent gated CD8+ cells.

[0256] OT-I T cells cultured without BMDDC were inactive (1.4% proliferation by CFSE dilution). OT-I T cells stimulated with BMDDC were activated (87.3% proliferation by CFSE dilution). LoSTIM 5 had negligible effect on the activation OT-I T cells by BMDDC (84.3% proliferation by CFSE dilution). LoSTIM 6 inhibited OT-I T cell activation by BMDDC (62.4% proliferation by CFSE dilution). LoSTIM 7 inhibited OT-I T cell activation by BMDDC most potently (43.9% proliferation by CFSE dilution). LoSTIM 8 had a modest effect on OT-I T cell activation (78.4% proliferation by CFSE dilution).

[0257] This experiment demonstrates inhibition of T cell activity by LoSTIM molecules of various molecular designs. These molecules are all are capable of simultaneously binding PD-1 on a T cell and an antigen on the surface of a cell interacting with the T cell.

[0258] It has also been found that, as shown in FIG. 5, LoSTIM-mediated inhibition of OT-I T cell activation is not due to H-2Kb blockade and requires a LoSTIM that engages PD-1. To address whether inhibition of OT-I activation by SIINFEKL-pulsed BMDDC was simply due to blockade of H-2Kb antigen presentation by LoSTIMs, CFSE-labeled OT-I CD8a+ T cells were cocultured with BMDDC in the presence of 0.5 micromolar of anti-H-2Kb, clone AF6. The H-2Kb binding domains of LoSTIMs 5-8 are derived from this clone, so AF6 would be expected to bind the same epitope of H-2Kb as LoSTIMs 5-8. After 57 hours of co-culture, OT-I T cell activation was assessed by CFSE dilution and CD69 expression.

[0259] OT-I cells co-cultured with BMDDC in the absence of antibody treatment were activated (63.6% proliferation by CFSE dilution and 42.6% CD69 expression). The addition of anti-H-2Kb clone AF6 to such a co-culture did not inhibit T cell activation (73.4% proliferation by CFSE dilution and 67.4% CD69 expression). Addition of equimolar quantities of anti-H-2Kb clone AF6 and LoSTIM 7 to such a co-culture did result in some inhibition of T cell activation (42.5% proliferation by CFSE dilution and 38.8% CD69 expression).

[0260] In summary, treatment with anti-H-2Kb clone AF6 was not sufficient to inhibit T cell activation. Thus, LoSTIM-mediated inhibition of T cell activation was not simply due to blockade of H-2Kb antigen presentation. Moreover, an equimolar mixture of LoSTIM 7 and anti-H-2Kb clone AF6 was able to exert some inhibition on T cell activation. As LoSTIM 7 and clone AF6 possess the same H-2Kb binding domain, one would expect an equilibration of the two species on surface H-2Kb. T cell activation was inhibited in the co-culture that contained this 1:1 mixture of species, thus demonstrating that the presence of a LoSTIM molecule that both binds H-2Kb as well as PD-1 is necessary for T cell inhibition.

[0261] As the experimental results shown in FIG. 6 demonstrate, allogeneic T cell activation is inhibited by LoSTIM treatment. To address whether LoSTIM molecules can inhibit the activation of T cells by allogeneic cells, C57B6 BMDDC were co-cultured with CFSE-labeled BALB/c CD8 T cells for 84 hours in the presence of LoSTIMs 5-8 at 0.5 micromolar.

[0262] BALB/c CD8 T cells co-cultured with BMDDC derived from C57B6 mice were potently activated (91.8% proliferation by CFSE dilution). Treatment of such a co-culture with LoSTIM 5 had only a minimal inhibitory effect on T cell activation (85.5% proliferation by CFSE dilution). Treatment with LoSTIM 6 inhibited T cell activation (71.1% proliferation by CFSE dilution). Treatment with LoSTIM 7 resulted in the most potent inhibition of T cell activation (63.6% proliferation by CFSE dilution). Treatment with LoSTIM 8 also resulted in inhibition of T cell activation (69.1% proliferation by CFSE dilution).

[0263] In summary, LoSTIM molecules of various molecular designs are capable of inhibiting the allogeneic activation of T cells.

[0264] The experimental results shown in FIG. 7 indicate that a LoSTIM binds the surface of an interacting cell to inhibit T cell activation, and that a LoSTIM that inhibits the binding of PD-1 to its natural ligands will potentiate T cell activation if it does not also bind the surface of the interacting cell. To determine whether binding of a LoSTIM to the surface of an opposing cell is necessary for the inhibition of T cell activation, CFSE-labeled OT-I CD8 T cells were co-cultured with SIINFEKL-pulsed BMDDC in the presence of LoSTIMs 1-4 at 0.5 micromolar for 57 hours. LoSTIMs 1-4 are identical in molecular design to LoSTIMs 5-8 except that they carry a Thy1.2 (CD90.2) binding domain instead of an H-2Kb binding domain. Since BMDDCs do not express Thy1.2 (panel B above), LoSTIMs 1-4 will not bind the surface of the BMDDCs. These LoSTIMs carry the same PD-1 binding domain as LoSTIMs 5-8 and, therefore, they will still bind PD-1 on T cells.

[0265] OT-I cells co-cultured with BMDDC in the absence of antibody treatment were activated (63.6% proliferation by CFSE dilution and 42.6% CD69 expression). Treatment with LoSTIMs 1-4 did not inhibit T cell activation in these co-cultures. In fact, LoSTIMs 1-4 potentiated T cell activation to varying degrees. LoSTIM 1 had a minimal potentiating effect on T cell activation (68.4% proliferation and 56% CD69 expression). LoSTIM 2 markedly potentiated T cell activation (98.6% proliferation and 78.9% CD69 expression). LoSTIM 3 also potentiated T cell activation (90.1% proliferation and 61% CD69 expression). LoSTIM 4 also markedly potentiated T cell activation (96.1% proliferation and 79% CD69 expression).

[0266] These data demonstrate that binding to PD-1 on the T cell, by itself, is insufficient for a LoSTIM to mediate T cell inhibition. The LoSTIM binds to an antigen on the surface of an opposing cell in trans. Binding in cis to PD-1 and another antigen on the T cell surface is insufficient to mediate T cell inhibition, and this is demonstrated by the data in FIG. 7 and FIG. 4 because, in both cases, the OT-I T cells express both cognate binding antigens for the LoSTIMs used. Finally, the data in FIG. 7 demonstrate that a LoSTIM blocking the interaction of PD-1 with its natural ligands will potentiate, rather than inhibit, T cell activity if it does not also bind the surface of the opposing cell.

### Example 2: Representative Sequences of LoSTIMs Used in Example 1

[0267] TABLE 4A

LoSTIM 1 (SEQ ID NO: 1)
Ligand-ScFv Fusion
[ligand (bold font)]-[G4AG4 (italicized font)]-[ScFv VL (underlined font)]-[G4S x 3 (italicized font)]-[ScFv VH (underlined font)] in order of appearance
FTITAPKDLYVVEYGSNVTNECRFPVERELDLLALVVYWEKEDEQVIQFVAGEEDLKPQHSNFRGRA SLPKDQLLKGNAALQITDVKLQDAGVYCCIISYGGADYKRITLKVNAPYRKINQRISVDPATSEHEL ICQAEGYPEAEVIWTNSDHQPVSGKRSVTTSRTEGMLLNVTSSLRVNATANDVFYCTFWRSQPGQNH TAELIIPELPATHPPQNRTHGGGGAGGGGEVQVVETGGGLVQPGSSLKLSCESSGFTFSSTWMNWVR QAPGKGLEWVALVKDKYSNYEANYAESVKGRFIISRDDSKNRVYLQMNTLRDQDTATYHCTRSRGYK NWYFDFWGPGTMVTVSSGGGGSGGGGSGGGGSDIQMTQSPPSLSASLGDKVTITCQASQNINNYIAW YQQKPGKAPGLLILYTSTLVSGTPSRFSGSGSGRDYSFSISNVESEDIASYYCLQYDNSPRTFGGGT KLELK

LoSTIM 2
Ligand-IgG2a mAb Fusion
[ligand (bold font)]-[G4AG4 (italicized font)]-[VH (underlined font)]-[mIgG2a CH + Fc (regular font with mutations underlined and bolded)] in order of appearance

HC (SEQ ID NO: 2)
FTITAPKDLYVVEYGSNVTNECRFPVERELDLLALVVYWEKEDEQVIQFVAGEEDLKPQHSNFRGRA SLPKDQLLKGNAALQITDVKLQDAGVYCCIISYGGADYKRITLKVNAPYRKINQRISVDPATSEHEL ICQAEGYPEAEVIWTNSDHQPVSGKRSVTTSRTEGMLLNVTSSLRVNATANDVFYCTFWRSQPGQNH TAELIIPELPATHPPQNRTHGGGGAGGGGEVQVVETGGGLVQPGSSLKLSCESSGFTFSSTWMNWVR QAPGKGLEWVALVKDKYSNYEANYAESVKGRFIISRDDSKNRVYLQMNTLRDQDTATYHCTRSRGYK NWYFDFWGPGTMVTVSSAKTTAPSVYPLAPVCGDTTGSSVTLGCLVKGYFPEPVTLTWNSGSLSSGV HTFPAVLQSDLYTLSSSVTVTSSTWPSQSITCNVAHPASSTKVDKKIEPRGPTIKPCPPCKCPAPNL EGGPSVFIFPPKIKDVLMISLSPIVTCVVVDVSEDDPDVQISWFVNNVEVHTAQTQTHREDYNSTLR VVSALPIQHQDWMSGKAFACAVNNKDLPAPIERTISKPKGSVRAPQVYVLPPPEEEMTKKQVTLTCM VTDFMPEDIYVEWTNNGKTELNYKNTEPVLDSDGSYFMYSKLRVEKKNWVERNSYSCSVVHEGLHNH HTTKSFSRTPGK

LC (SEQ ID NO: 3) [VL (underlined font)]
DIQMTQSPPSLSASLGDKVTITCQASQNINNYIAWYQQKPGKAPGLLILYTSTLVSGTPSRFSGSGS GRDYSFSISNVESEDIASYYCLQYDNSPRTFGGGTKLELKRADAAPTVSIFPPSSEQLTSGGASVVC FLNNFYPKDINVKWKIDGSERQNGVLNSWTDQDSKDSTYSMSSTLTLTKDEYERHNSYTCEATHKTS TSPIVKSFNRNEC

LoSTIM 3
Bispecific IgG2a mAb with N-terminal scFv
[VL scFv (underlined font)]-[G4S x 3 (italicized font)]-[VH scFv (underlined font)]-[G4AG4 (italicized font)]-[VH (underlined font)]-[mIgG2a CH + Fc (regular font with mutations underlined and bolded)] in order of appearance
HC (SEQ ID NO: 4)
DVALTQTPVAQPVTLGDQASISCRSSQSLVHSNGRTYLEWYLQKPGQSPQLLIYKVSNRFSGVPDRF IGSGSGSDFTLTISRVEPEDLGVYYCFQATHDPNTFGAGTKLELKGGGGSGGGGSGGGGSQVQLQQS GAELVKPGSSVKISCKASGYTFTSHFIHWIKQQPGNGLEWIGGIYPGDGDTEYNQQFNGKATLTADK SSSTAYMRLSSLTSEDSAVYFCATRVPSYWFFDFWGPGTMVTVSSGGGGAGGGGEVQVVETGGGLVQ PGSSLKLSCESSGFTFSSTWMNWVRQAPGKGLEWVALVKDKYSNYEANYAESVKGRFIISRDDSKNR VYLQMNTLRDQDTATYHCTRSRGYKNWYFDFWGPGTMVTVSSAKTTAPSVYPLAPVCGDTTGSSVTL GCLVKGYFPEPVTLTWNSGSLSSGVHTFPAVLQSDLYTLSSSVTVTSSTWPSQSITCNVAHPASSTK VDKKIEPRGPTIKPCPPCKCPAPNLEGGPSVFIFPPKIKDVLMISLSPIVTCVVVDVSEDDPDVQIS WFVNNVEVHTAQTQTHREDYNSTLRVVSALPIQHQDWMSGKAFACAVNNKDLPAPIERTISKPKGSV RAPQVYVLPPPEEEMTKKQVTLTCMVTDFMPEDIYVEWTNNGKTELNYKNTEPVLDSDGSYFMYSKL RVEKKNWVERNSYSCSVVHEGLHNHHTTKSFSRTPGK

LC (SEQ ID NO: 5) [VL (underlined font)]
DIQMTQSPPSLSASLGDKVTITCQASQNINNYIAWYQQKPGKAPGLLILYTSTLVSGTPSRFSGSGS GRDYSFSISNVESEDIASYYCLQYDNSPRTFGGGTKLELKRADAAPTVSIFPPSSEQLTSGGASVVC FLNNFYPKDINVKWKIDGSERQNGVLNSWTDQDSKDSTYSMSSTLTLTKDEYERHNSYTCEATHKTS TSPIVKSFNRNEC

LoSTIM 4
Bispecific IgG2a (mut) mAb C-terminal scFv
[VH (underlined font)]-[mIgG2a CH + Fc (regular font with mutations underlined and bolded)]-[G4AG4 (italicized font)]-[VL scFv (underlined font)]-[G4S x 3 (italicized font)]-[VH scFv (underlined font)] in order of appearance

HC (SEQ ID NO: 6)
EVQVVETGGGLVQPGSSLKLSCESSGFTFSSTWMNWVRQAPGKGLEWVALVKDKYSNYEANYAESVK GRFIISRDDSKNRVYLQMNTLRDQDTATYHCTRSRGYKNWYFDFWGPGTMVTVSSAKTTAPSVYPLA PVCGDTTGSSVTLGCLVKGYFPEPVTLTWNSGSLSSGVHTFPAVLQSDLYTLSSSVTVTSSTWPSQS ITCNVAHPASSTKVDKKIEPRGPTIKPCPPCKCPAPNLEGGPSVFIFPPKIKDVLMISLSPIVTCVV VDVSEDDPDVQISWFVNNVEVHTAQTQTHREDYNSTLRVVSALPIQHQDWMSGKAFACAVNNKDLPA PIERTISKPKGSVRAPQVYVLPPPEEEMTKKQVTLTCMVTDFMPEDIYVEWTNNGKTELNYKNTEPV LDSDGSYFMYSKLRVEKKNWVERNSYSCSVVHEGLHNHHTTKSFSRTPGKGGGGAGGGGDVALTQTP VAQPVTLGDQASISCRSSQSLVHSNGRTYLEWYLQKPGQSPQLLIYKVSNRFSGVPDRFIGSGSGSD FTLTISRVEPEDLGVYYCFQATHDPNTFGAGTKLELKGGGGSGGGGSGGGGSQVQLQQSGAELVKPG SSVKISCKASGYTFTSHFIHWIKQQPGNGLEWIGGIYPGDGDTEYNQQFNGKATLTADKSSSTAYMR LSSLTSEDSAVYFCATRVPSYWFFDFWGPGTMVTVSS

LC (SEQ ID NO: 7) [VL (underlined font)]
DIQMTQSPPSLSASLGDKVTITCQASQNINNYIAWYQQKPGKAPGLLILYTSTLVSGTPSRFSGSGS GRDYSFSISNVESEDIASYYCLQYDNSPRTFGGGTKLELKRADAAPTVSIFPPSSEQLTSGGASVVC FLNNFYPKDINVKWKIDGSERQNGVLNSWTDQDSKDSTYSMSSTLTLTKDEYERHNSYTCEATHKTS TSPIVKSFNRNEC

LoSTIM 5 (SEQ ID NO: 8)
Ligand-ScFv Fusion
[ligand (bold font)]-[G4AG4 (italicized font)]-[ScFv VL (underlined font)]-[G4S x 3 (italicized font)]-[ScFv VH (underlined font)] in order of appearance FTITAPKDLYVVEYGSNVTNECRFPVERELDLLALVVYWEKEDEQVIQFVAGEEDLKPQHSNFRGRA SLPKDQLLKGNAALQITDVKLQDAGVYCCIISYGGADYKRITLKVNAPYRKINQRISVDPATSEHEL ICQAEGYPEAEVIWTNSDHQPVSGKRSVTTSRTEGMLLNVTSSLRVNATANDVFYCTFWRSQPGQNH TAELIIPELPATHPPQNRTHGGGGAGGGGDVQLVESGGGLVQPGGSRKLSCAASGFTFSSFGMHWVR QAPEKGLEWVAYISSGSNTIYYADTVKGRFTISRDNPKNTLFLQMTSLRSEDTAMYYCALTTGSWFA YWGQGTLVTVSAGGGGSGGGGSGGGGSDILLTQSPAILSVRPGERVSFSCRASQSLGTSIHWYQQRT DGSPRLLIKYASESISGIPSRFSGSGSGTDFTLSINSVESEDIADYYCQQSNSWPITFGAGTKLELK

LoSTIM 6
Ligand-mAb Fusion
[ligand (bold font)]-[G4AG4 (italicized font)]-[VH (underlined font)]-[CH + Fc (regular font with mutations underlined and bolded)] in order of appearance

HC (SEQ ID NO: 9)
FTITAPKDLYVVEYGSNVTNECRFPVERELDLLALVVYWEKEDEQVIQFVAGEEDLKPQHSNFRGRA SLPKDQLLKGNAALQITDVKLQDAGVYCCIISYGGADYKRITLKVNAPYRKINQRISVDPATSEHEL ICQAEGYPEAEVIWTNSDHQPVSGKRSVTTSRTEGMLLNVTSSLRVNATANDVFYCTFWRSQPGQNH TAELIIPELPATHPPQNRTHGGGGAGGGGDVQLVESGGGLVQPGGSRKLSCAASGFTFSSFGMHWVR QAPEKGLEWVAYISSGSNTIYYADTVKGRFTISRDNPKNTLFLQMTSLRSEDTAMYYCALTTGSWFA YWGQGTLVTVSAAKTTAPSVYPLAPVCGDTTGSSVTLGCLVKGYFPEPVTLTWNSGSLSSGVHTFPA VLQSDLYTLSSSVTVTSSTWPSQSITCNVAHPASSTKVDKKIEPRGPTIKPCPPCKCPAPNLEGGPS
VFIFPPKIKDVLMISLSPIVTCVVVDVSEDDPDVQISWFVNNVEVHTAQTQTHREDYNSTLRVVSAL PIQHQDWMSGKAFACAVNNKDLPAPIERTISKPKGSVRAPQVYVLPPPEEEMTKKQVTLTCMVTDFM PEDIYVEWTNNGKTELNYKNTEPVLDSDGSYFMYSKLRVEKKNWVERNSYSCSVVHEGLHNHHTTKS FSRTPGK

LC (SEQ ID NO: 10) [VL (underlined font)]
DILLTQSPAILSVRPGERVSFSCRASQSLGTSIHWYQQRTDGSPRLLIKYASESISGIPSRFSGSGS GTDFTLSINSVESEDIADYYCQQSNSWPITFGAGTKLELKRADAAPTVSIFPPSSEQLTSGGASVVC FLNNFYPKDINVKWKIDGSERQNGVLNSWTDQDSKDSTYSMSSTLTLTKDEYERHNSYTCEATHKTS TSPIVKSFNRNEC

LoSTIM 7
Bispecific IgG2a (mut) mAb with N-terminal scFv
[VL scFv (underlined font)]-[G4S x 3 (italicized font)]-[VH scFv (underlined font)]-[G4AG4 (italicized font)]-[VH]-[CH + Fc (regular font with mutations underlined and bolded)] in order of appearance

HC (SEQ ID NO: 11)
DVALTQTPVAQPVTLGDQASISCRSSQSLVHSNGRTYLEWYLQKPGQSPQLLIYKVSNRFSGVPDRF IGSGSGSDFTLTISRVEPEDLGVYYCFQATHDPNTFGAGTKLELKGGGGSGGGGSGGGGSQVQLQQS GAELVKPGSSVKISCKASGYTFTSHFIHWIKQQPGNGLEWIGGIYPGDGDTEYNQQFNGKATLTADK SSSTAYMRLSSLTSEDSAVYFCATRVPSYWFFDFWGPGTMVTVSSGGGGAGGGGDVQLVESGGGLVQ PGGSRKLSCAASGFTFSSFGMHWVRQAPEKGLEWVAYISSGSNTIYYADTVKGRFTISRDNPKNTLF LQMTSLRSEDTAMYYCALTTGSWFAYWGQGTLVTVSAAKTTAPSVYPLAPVCGDTTGSSVTLGCLVK GYFPEPVTLTWNSGSLSSGVHTFPAVLQSDLYTLSSSVTVTSSTWPSQSITCNVAHPASSTKVDKKI EPRGPTIKPCPPCKCPAPNLEGGPSVFIFPPKIKDVLMISLSPIVTCVVVDVSEDDPDVQISWFVNN VEVHTAQTQTHREDYNSTLRVVSALPIQHQDWMSGKAFACAVNNKDLPAPIERTISKPKGSVRAPQV YVLPPPEEEMTKKQVTLTCMVTDFMPEDIYVEWTNNGKTELNYKNTEPVLDSDGSYFMYSKLRVEKK NWVERNSYSCSVVHEGLHNHHTTKSFSRTPGK

LC (SEQ ID NO: 12) [VL (underlined font)]
DILLTQSPAILSVRPGERVSFSCRASQSLGTSIHWYQQRTDGSPRLLIKYASESISGIPSRFSGSGS GTDFTLSINSVESEDIADYYCQQSNSWPITFGAGTKLELKRADAAPTVSIFPPSSEQLTSGGASVVC FLNNFYPKDINVKWKIDGSERQNGVLNSWTDQDSKDSTYSMSSTLTLTKDEYERHNSYTCEATHKTS TSPIVKSFNRNEC

LoSTIM 8
Bispecific IgG2a (mut) mAb C-terminal scFv
[VH (underlined font)]-[CH + Fc (regular font with mutations underlined and bolded)]-[G4AG4 (italicized font)]-[VL scFv (underlined font)]-[G4S x 3 (italicized font)]-[VH scFv (underlined font)] in order of appearance

HC (SEQ ID NO: 13)
DVQLVESGGGLVQPGGSRKLSCAASGFTFSSFGMHWVRQAPEKGLEWVAYISSGSNTIYYADTVKGR FTISRDNPKNTLFLQMTSLRSEDTAMYYCALTTGSWFAYWGQGTLVTVSAAKTTAPSVYPLAPVCGD TTGSSVTLGCLVKGYFPEPVTLTWNSGSLSSGVHTFPAVLQSDLYTLSSSVTVTSSTWPSQSITCNV AHPASSTKVDKKIEPRGPTIKPCPPCKCPAPNLEGGPSVFIFPPKIKDVLMISLSPIVTCVVVDVSE DDPDVQISWFVNNVEVHTAQTQTHREDYNSTLRVVSALPIQHQDWMSGKAFACAVNNKDLPAPIERT ISKPKGSVRAPQVYVLPPPEEEMTKKQVTLTCMVTDFMPEDIYVEWTNNGKTELNYKNTEPVLDSDG SYFMYSKLRVEKKNWVERNSYSCSVVHEGLHNHHTTKSFSRTPGKGGGGAGGGGDVALTQTPVAQPV TLGDQASISCRSSQSLVHSNGRTYLEWYLQKPGQSPQLLIYKVSNRFSGVPDRFIGSGSGSDFTLTI SRVEPEDLGVYYCFQATHDPNTFGAGTKLELKGGGGSGGGGSGGGGSQVQLQQSGAELVKPGSSVKI SCKASGYTFTSHFIHWIKQQPGNGLEWIGGIYPGDGDTEYNQQFNGKATLTADKSSSTAYMRLSSLT SEDSAVYFCATRVPSYWFFDFWGPGTMVTVSS

LC (SEQ ID NO: 14) [VL (underlined font)]
DILLTQSPAILSVRPGERVSFSCRASQSLGTSIHWYQQRTDGSPRLLIKYASESISGIPSRFSGSGS GTDFTLSINSVESEDIADYYCQQSNSWPITFGAGTKLELKRADAAPTVSIFPPSSEQLTSGGASVVC
FLNNFYPKDINVKWKIDGSERQNGVLNSWTDQDSKDSTYSMSSTLTLTKDEYERHNSYTCEATHKTS TSPIVKSFNRNEC

### Example 3: Various Representative Uses of LoSTIMs

[0268] A conceptual overview of LoSTIMs is shown in FIG. 8. The trans bispecific binding of a LoSTIM to PD-1 on the T cell and to a cell-surface antigen on the opposing target cell results in PD-1 clustering on the T cell surface and co-localization of this cluster with the immunological synapse, thereby activating PD-1 and inhibiting T cell activity. PD-1 is free to move laterally on the T cell surface and it is activated when clustered in proximity to the immunological synapse. Thus, trans bispecific binding of the LoSTIM to the surface antigen on the target cell and to PD-1 on the T cell will recruit and cluster PD-1 at the cell-cell interface, where the immunological synapse is located. This activates PD-1, resulting in inhibition of TCR signaling and T cell activity. Engagement of the antigen on the target cell surface is necessary for a LoSTIM to function as a PD-1 agonist: simply binding PD-1 alone will not cluster and co-localize PD-1 to the immunological synapse and will therefore not inhibit T cell activity. This property allows a LoSTIM to function as selective PD-1 agonist, inhibiting T cell activity only in tissues that express the surface antigen. A LoSTIM may or may not be designed to block the engagement of PD-1 by its natural ligands. If it is designed to block the engagement of PD-1 by its ligands, it will act as an antagonist of PD-1 on T cells interacting with tissues that do not express the surface antigen, while still acting as an agonist of PD-1 on T cells interacting with tissues that do express the surface antigen. A single LoSTIM molecule of this design will therefore function as either an inhibitor or potentiator of T cell activity depending on the tissue context.

[0269] Binding to cells that express the model surface antigen H-2K^{b} is shown in FIG. 9. Binding to H-2K^{b} was assessed by flow cytometry using the C57BL/6 colorectal cancer cell line MC38, which is known to express H-2K^{b}. Specificity was demonstrated by assessing binding to CT-26 cells, known not to express H-2Kb. The LoSTIM bound avidly to MC38 cells but not to CT-26 cells. In a separate experiment, binding to H-2K^{b} was assessed by flow cytometry using BMDDC from C57BL/6 mice, which express H-2K^{b}, or BMDDC from C3H mice, which do not express H-2K^{b}. The LoSTIM bound avidly to C57BL/6 BMDDC cells but not to C3H BMDDC cells.

[0270] Binding to PD-1 and bispecific binding to PD-1 and H-2K^{b} is shown in FIG. 10. Binding of the LoSTIM to PD-1 was assessed by flow cytometry using 300-mPD-1 cells, transgenic mouse pro-B cells that stably express mouse PD-1. The LoSTIM bound 300-mPD-1 cells avidly. Simultaneous bispecific binding to PD-1 and H-2K^{b} was assessed by flow cytometry using MC38 cells, which express H-2K^{b} but not PD-1, and a soluble mouse PD-1-Fc fusion bearing a human IgG1 Fc domain (mPD-1-hFc). Binding of the mPD-1-hFc to MC38 cells as measured by a fluorophore-labeled an anti-human IgG secondary antibody indicated bispecific binding of the LoSTIM to H-2K^{b} on MC38 cells and to the mPD-1-hFc. This also confirmed the specificity of PD-1 binding.

[0271] Futher experiments, as shown in FIG. 11, desmonstrated that LoSTIM binds to T cells that express PD-1 but not to T cells that do not express PD-1. To further confirm PD-1 binding specificity, binding of the LoSTIM to activated primary T cells that express PD-1 was compared with binding to naive primary T cells that do not express PD-1. These T cells were obtained from mice from BALB/cByJ mice that do not express H-2K^{b}, therefore binding to activated T cells should only occur if the LoSTIM binds specifically to PD-1. The LoSTIM bound avidly to activated BALB/cByJ T cells but not to naive BALB/cByJ T cells, further confirming the specificity of PD-1 binding.

[0272] Inhibition of T cell activation was investigated as shown in FIG. 12. To assess the effect of the LoSTIM on T cell activation by APCs that express the H-2K^{b} model surface antigen, primary CD4+ BALB/cByJ T cells (H-2K^{b} negative) were co-cultured with B-cells obtained from C57BL/6 mice (H-2K^{b} positive) at a 1:1 ratio for five days. Cultures were treated with 500 nanomolar of either LoSTIM, the parent anti-H-2K^{b} antibody (AF6-88.5.3), the parent anti-PD-1 antibody (29F.1A12), or vehicle (PBS). The LoSTIM completely inhibited APC-induced proliferation of T cells as measured by CFSE dilution. Neither AF6-88.5.3, 29F.1A12, nor vehicle affected T cell proliferation. This demonstrates that the LoSTIM inhibits T cell activation by APCs that express a surface antigen that binds the LoSTIM. The bispecific binding of the LoSTIM to PD-1 on the T cell and to the surface antigen on the target cell was necessary for this effect, as demonstrated by a lack of T cell inhibition by either AF6-88.5.3, which binds the model surface antigen H-2K^{b}, or 29F.1A12, which binds PD-1. In a similar separate experiment, two concentrations of LoSTIM were used and the inhibition of T cell proliferation was found to be dose-dependent.

[0273] Inhibition of TCR signaling was investigated as shown in FIG. 13. To assess the effect on TCR signaling, CD8+ T cells expressing a transgenic TCR that recognizes the ovalbumin antigen SIINFEKL were purified from OT-1 mice, activated by plate-bound anti-CD3/CD28 antibody, rested, and then re-stimulated by C57BL/6 cells loaded with the SIINFEKL antigen. TCR activation was assessed by phosphoflow cytometry using an a fluorophore-labeled antibody specific for phosphorylated Zap70. Zap70 is a membrane-proximal kinase that is phosphorylated and activated upon TCR activation and is responsible for TCR signal transduction. PD-1 activation is known to inhibit TCR-mediated Zap70 phosphorylation. Treatment with LoSTIM inhibited antigen-induced Zap70 phosphorylation.

[0274] Cell-specific and/or tissue-specific inhibition of T cell activation was investigated as shown in FIG. 14. The effect of the LoSTIM was compared when T cells were co-cultured with APCs that express the model cell surface antigen H-2K^{b} and when T cells were co-cultured with APCs that do not express H-2K^{b}. To accomplish this, purified BALB/cByJ CD8+ T cells were co-cultured with either BMDDC from C57BL/6 mice, which express the model cell surface antigen H-2K^{b}, or BMDDC from C3H mice, which do not express H-2K^{b}. Cultures were treated with varying concentrations of LoSTIM. Relative T cell proliferation was calculated by normalizing the percentage T cell proliferation by the percentage T cell proliferation of co-cultures treated with vehicle (PBS). Because the strength of allostimulation can vary between backgrounds, this calculation was performed separately for BALB/cByJ T cells stimulated by C57BL/6 BMDDC and C3H BMDDC. T cell activation was inhibited when the LoSTIM bound the target cell but did was not inhibited when the LoSTIM did not bind the target cell.

[0275] Inhibition of allorejection in vivo was investigated as shown in FIG. 15. A model of allorejection was used to assess the ability of the LoSTIM to inhibit immune activity in vivo against target cells that express an antigen that binds the LoSTIM. MC38 cells (of C57BL/6 origin) were injected subcutaneously in BALB/cByJ mice. Tumor volumes were significantly larger in mice that received intraperitoneal injections of LoSTIM when compared with mice that received PBS as a vehicle control (p = 0.0297). This demonstrates that the LoSTIM can inhibit immune activity against target cells in vivo, if the target cells express an antigen to which the LoSTIM binds.

[0276] Treatment of syngenic tumor in vivo was investigated as shown in FIG. 16. A model of syngeneic tumor treatment was used to assess the in vivo effect of the LoSTIM on immune activity against target cells that do not express an antigen that binds the LoSTIM. CT-26 cells were injected subcutaneously in BALB/cByJ mice and mice were treated with either LoSTIM, 29F.1A12 (the parent anti-PD-1 antibody used in design of the LoSTIM), or PBS as a vehicle control. The LoSTIM did not inhibit immune activity against CT-26 cells. Instead, the LoSTIM promoted immune activity against CT-26 cells, functioning similarly to the PD-1 inhibitor 29F.1A12. This demonstrates that the LoSTIM will not inhibit immune activity against target cells that do not express an antigen to which it binds. Moreover, it demonstrates that a LoSTIM that blocks the natural ligation of PD-1 will function as a PD-1 inhibitor in these contexts.

[0277] Moreover, experiments were performed demonstrating that T-cell inhibition occurs when the LoSTIM is present at a concentration where binding to both of its binding partners (PD-1 and the tissue antigen) is not saturated (FIGS. 19-21), thereby confirming that the LoSTIM functions as a PD-1 agonist below the concentration where the binding curves for both PD-1 and the tissue antigen predict maximal binding (FIG. 21). Without being bound by theory, it is believed that a single LoSTIM molecule binds simultaneously to the tissue antigen and PD-1 on the opposing T-cell surface and this is favored at non-saturating concentrations. Conversely, at concentrations where the binding to each binding partner is maximal (saturating concentrations), mono-specific binding to each binding partner is favored, which does not result in PD-1 clustering. For example, FIG. 21 shows that true bispecific binding increases as concentration increases before decreasing as the concentration approaches the saturating concentration of the lowest affinity binding partner. The net result is that LoSTIMs with a wider differential between affinities for their two binding partners are believed to possess a broader range of concentrations where they function as PD-1 agonists and thus have a wider therapeutic window. Conversely, PD-1 bispecifics that have a more similar binding affinity for their two binding partners would have a narrower range of concentrations where they exhibit true bispecific binding facilitating PD-1 agonism. This results explains why anti-PD-1/anti-PD-L1 bispecific antibodies can function as both PD-1 and PD-L1 inhibitors (dual checkpoint inhibitors) while not resulting in appreciable PD-1 clustering and agonism since such antibodies are believed to have similar affinity for each of their binding partners, and because of this, there would be little appreciable window of concentrations where they can cluster PD-1. This applies to both blocking and non-blocking LoSTIMs.

[0278] Generally, a LoSTIM that is intended to function as a PD-1 inhibitor systemically, while also functioning as a PD-1 agonist locally (e.g., for cancer treatment) should benefit from having a higher affinity for PD-1 than for the tissue-specific surface antigen. As discussed above, its binding to PD-1 ideally should be at or near saturation to ensure blockade of PD-L1 at the tumor site, but binding to both PD-1 and the surface antigen should not both be saturated in order for the LoSTIM to function as a PD-1 agonist on surface antigen-expressing tissue.

[0279] In some embodiments, additional LoSTIM design characteristics may be useful and are contemplated. For example, in a LoSTIM that has a higher affinity for PD-1, it is believed to be advantageous, in some embodiments, for it to be a monovalent bispecific (have one binding site rather than two binding sites for each binding partner, especially for PD-1). Without being bound by theory, it is believed that, when in solution at a concentration that is saturating for PD-1 binding, a bivalent LoSTIM could bind more than one copy of PD-1 on the T-cell surface at the same time, and, in doing so, bridge these two copies of PD-1 at a distance or an orientation that is incompatible with their activation. The data described herein indicate that a bivalent monospecific ant-PD-1 antibody (e.g., mAb 5E12) can bridge PD-1 at a distance or orientation that is incompatible with its activation (FIG. 23). mAb 5E12 is an anti-PD-1 antibody that does not block the ligation of PD-1 by PD-L1, so it would not be expected to function as a checkpoint inhibitor. Yet, it appears to still promote the clearance of tumor (e.g., a tumor allograft is rejected far more quickly in 5E12 treated mice than in mice treated with vehicle). Since mAb 5E12 binds PD-1 but does not block PD-L1 binding, the data provided herein indicate that it disrupts PD-1 function using a different mechanism, which is believed to be that stabilized PD-1 in a dimer is in some way incompatible with activation and which determination that LoSTIMs as a bispecific molecules having a single PD-1 binding site advantage is unexpected. Any anti-PD-1 clone should be able to be used in a monovalent bispecific LoSTIM provided it has a difference in binding affinities for PD-1 and the surface antigen and/or ii) has a higher binding affinity for PD-1 than the surface antigen in LoSTIMs that act as checkpoint inhibitors systemically while also functioning as a PD-1 agonist locally, as described above.

[0280] In some embodiments, a LoSTIM may have an engineered Fc domain, such as to attenuate binding of the Fc to an IgG antibody receptor like an Fc-gamma receptor (e.g., FcyRI, FcyRIIA, FcyRIIB 1, FcyRIIB2, FcyRIIIA, and/or FcyRIIIB). This is useful in some embodiments because Fc-gamma receptor binding may cause the LoSTIM to bind the surface of professional antigen presenting cells that express Fc-gamma receptors, thus inhibiting or partially inhibiting the priming of new T-cell responses.

[0281] As described herein, surface antigen choice for LoSTIM targeting is not particularly limited as long as there is expression of the surface antigen at any level on the desired tissue for protection and not on the cancer or other tissue of interest. However, in some embodiments, certain surface antigens may be particularly useful for certain clinical applications. For example, as described herein, for LoSTIMs capable of treating solid malignancy while also treating or prophylaxing against immune related adverse events (irAE), the surface antigen must be expressed on the tissue where immunotolerance is desired (tissue affected by or at risk of being affected by an irAE) but should not be expressed on cancer cells. Since the antigens expressed by different cancers and different peripheral tissues may not be the same, different antigens are appropriate to protect certain tissues at risk of irAE in the context of treatment for a given cancer type of interest. Some surface antigens are appropriate for LoSTIMs are useful across multiple clinical scenarios. Thus, in addition to biophysical criteria for compatibility of a PD-1 binding moiety and a surface antigen moiety in a LoSTIM, certain criteria for selecting particular surface antigens in the context of a clinical application may include one or more of the following: 1) presence on the plasma membrane of the cell, 2) presence on the basolateral surface of the plasma membrane in cells that comprise epithelial tissue, and 3) surface antigen expression level and/or surface density on the portion of the cell surface that may come in contact with immune cells (e.g., the basolateral surface of cells comprising epithelial tissue).

[0282] Well-known bioinformatics analyses can be applied to analyzing publicly available and well-known gene expression and protein expression data sources in order to identify surface antigens of interest. For example, the Human Protein Atlas dataset (version 20.1) was downloaded from the World Wide Web at proteinatlas.org/about/download. This dataset comprises the protein expression data from 44 normal human tissue types derived from antibody-based protein profiling using immunohistochemistry. Protein expression profiles from 17 forms of human cancer were also downloaded from this source (version 20.1). A list of membrane proteins (membrane-integral and membrane-associated) was downloaded from The Universal Protein Resource (Uniprot) available on the World Wide Web at uniprot.org (the following search terms were used: locations:(location:“Membrane [SL-0162]”) AND reviewed:yes AND organism:“Homo sapiens (Human) [9606]”). A set of custom computer programs written in the Matlab computer language were then used to integrate these datasets into a single database in which normal tissue expression profiles and cancer tissue expression profiles are linked for each protein in the database. After filtering the database to remove any proteins not listed as a membrane protein in the list obtained from Uniprot, the database was searched for proteins that meet criteria appropriate for each clinical application. For applications involving the treatment of cancer, such as treatment of irAE or GVHD, a surface antigen was appropriate if it was expressed on the tissue where immunotolerance is desired but not expressed on the cancer being treated. Representative, non-limiting examples of surface antigens for advantageous use in certain clinical applications include the following table: Table 3

TABLE 3A

List of proteins that meet criteria and have at least low expression on tissues where immune cell inhibition is desired (Ensembl version 92.38 ID for is provided for each gene symbol):
List of proteins that meet criteria and have at least LOW expression on tissues where immune cell inhibition is desired (Ensembl version 92.38 ID for is provided for each gene symbol):
TTYH3(ENSG00000136295), AXL(ENSG00000167601), VPS52(ENSG00000223501), MS4A8(ENSG00000166959), MAP1LC3A(ENSG00000101460), CD36(ENSG00000135218), FCAMR(ENSG00000162897), MGAT4C(ENSG00000182050), SCGN(ENSG00000079689), SLC9A2(ENSG00000115616), TM4SF18(ENSG00000163762), SNTG2(ENSG00000172554), PCSKS(ENSG00000099139), ALPL(ENSG00000162551), SELENBPl(ENSG00000143416), STX1A(ENSG00000106089), SNX24(ENSG00000064652), SMIM24(ENSG00000095932), SMURF1(ENSG00000198742), NAAA(ENSG00000138744), SLC27A2(ENSG00000140284), SEC13(ENSG00000157020), SLC41A2(ENSG00000136052), SOCS7(ENSG00000274211), QRFPR(ENSG00000186867), RPH3AL(ENSG00000181031), MPP7(ENSG00000150054), RAC1(ENSG00000136238), RNF145(ENSG00000145860), SERINC3(ENSG00000132824), ARHGAP5(ENSG00000100852), NFAM1(ENSG0000023SS68), HCRTR1(ENSG00000121764), LDLR(ENSG00000130164), GPR65(ENSG00000140030), RAC3(ENSG00000169750), MUC12(ENSG00000205277), WSCD1(ENSG00000179314), HTRAl(ENSG00000166033), RAB27B(ENSG00000041353), KLRG1(ENSG00000139187), PARVB(ENSG00000188677), DLC1(ENSG00000164741), PLCB3(ENSG00000149782), PCDHA4(ENSG00000204967), RECK(ENSG00000122707), MUC1(ENSG00000185499), PSTPIP2(ENSG00000152229), RAB3B(ENSG00000169213), PSCA(ENSG00000167653), KCNH8(ENSG00000183960), SDC1(ENSG00000115884), TMEM45A(ENSG00000181458), TPSG1(ENSG00000116176), TRPM7(ENSG00000092439), SLC18A1(ENSG00000036565), SPPL3(ENSG00000157837), STYK1(ENSG00000060140), TMEM134(ENSG00000172663), MAPKAP1(ENSG00000119487), IFI27(ENSG00000165949), ITLN1(ENSG00000179914), PTGDR(ENSG00000168229), SGMS1(ENSG00000198964), SYNGR4(ENSG00000105467), ITGB6(ENSG00000115221), MUC15(ENSG00000169550), PEX10(ENSG00000157911), OSBPL7(ENSG00000006025), CD46(ENSG00000117335), PROM2(ENSG00000155066), PLPP7(ENSG00000160539), MGAT4A(ENSG00000071073), LRRN2(ENSG00000170382), OBSCN(ENSG00000154358), PROM1(ENSG00000007062), UGT2B4(ENSG00000156096), TMEM72(ENSG00000187783), TMEM132A(ENSG00000006118), VSIG10(ENSG00000176834), SYT11(ENSG00000132718), TMEM236(ENSG00000148483), SLC7A7(ENSG00000155465), TMEM143(ENSG00000161558), VPS35L(ENSG00000103544), ZP2(ENSG00000103310), SYTL4(ENSG00000102362), SYTL3(ENSG00000164674), TMEM41A(ENSG00000163900), TSPAN8(ENSG00000127324), UNC13B(ENSG00000198722), PLAUR(ENSG00000011422), SYTL2(ENSG00000137501), PRRG2(ENSG00000126460), TPRA1(ENSG00000163870), SLC46A2(ENSG00000119457), OCLN(ENSG00000197822), RNF170(ENSG00000120925), SPHK1(ENSG00000176170), SLC28A3(ENSG00000197506), SCAMPS(ENSG00000198794), PTAFR(ENSG00000169403), SYP(ENSG00000102003), PIGZ(ENSG00000119227), PTPRN2(ENSG00000155093), RSAD2(ENSG00000134321), SLC39A14(ENSG00000104635), SLC6A12(ENSG00000111181), SLC6A15(ENSG00000072041), RAB25(ENSG00000132698), SLC20A2(ENSG00000168575), SLC39A10(ENSG00000196950), TGFBR1(ENSG00000106799), STK16(ENSG00000115661), TRAF4(ENSG00000076604), SIGLEC14(ENSG00000254415), MTG2(ENSG00000101181), SPTLC3(ENSG00000172296), SEC11C(ENSG00000166562), MARK2(ENSG00000072518), SCN7A(ENSG00000136546), SLC15A3(ENSG00000110446), PNLDC1(ENSG00000146453), ARHGAP27(ENSG00000159314), RNF186(ENSG00000178828), TSPAN15(ENSG00000099282), TRAF3IP3(ENSG00000009790), VTCN1(ENSG00000134258), TAS2R38(ENSG00000257138), TCTN3(ENSG00000119977), UBL3(ENSG00000122042), TMEM39B(ENSG00000121775), SLC30A10(ENSG00000196660), CA2(ENSG00000104267), CDHR5(ENSG00000099834), CLDN4(ENSG00000189143), ARL4D(ENSG00000175906), ACVR1B(ENSG00000135503), GGT1(ENSG00000100031), DPEP1(ENSG00000015413), GSDMB(ENSG00000073605), GPBAR1(ENSG00000179921), GHR(ENSG00000112964), KCNJ8(ENSG00000121361), SYK(ENSG00000165025), FPR1(ENSG00000171051), ADCY10(ENSG00000143199), ACSL5(ENSG00000197142), CD177(ENSG00000204936), CLCA1(ENSG00000016490), GLP2R(ENSG00000065325), CADM4(ENSG00000105767), DSC2(ENSG00000134755), GNB5 (ENSG00000069966), ADGRF1(ENSG00000153292), RASGRP2(ENSG00000068831), CLDN5(ENSG00000184113), EPHA4(ENSG00000116106), HCAR3(ENSG00000255398), DSG2(ENSG00000046604), AQP8(ENSG00000103375), CNTFR(ENSG00000122756), CEACAMS(ENSG00000105388), CHST6(ENSG00000183196), CA4(ENSG00000167434), DEPDC5(ENSG00000100150), EPCAM(ENSG00000119888), GNG11(ENSG00000127920), LPAR6(ENSG00000139679), CTDNEP1(ENSG00000175826), CPTP(ENSG00000224051), HSD17B2(ENSG00000086696), MAGI1(ENSG00000151276), ENTPD8(ENSG00000188833), FPGS(ENSG00000136877), MAN1C1(ENSG00000117643), FADS3(ENSG00000221968), CXCRl(ENSG00000163464), FADS2(ENSG00000134824), FER1L6(ENSG00000214814), ANKRD13B(ENSG00000198720), BEST2(ENSG00000039987), BRI3(ENSG00000164713), CDC42EP5(ENSG00000167617), CLDN8(ENSG00000156284), GAL3ST2(ENSG00000154252), HTR4(ENSG00000164270), B3GNT8(ENSG00000177191),
ELOVL7(ENSG00000164181), B3GALT5(ENSG00000183778), CDHR2(ENSG00000074276), CLDN7(ENSG00000181885), CLN3(ENSG00000188603), CRB3(ENSG00000130545), ACE2(ENSG00000130234), SH3BP5(ENSG00000131370), ATP9A(ENSG00000054793), CNTNAP3(ENSG00000106714), CDH17(ENSG00000079112), C3AR1(ENSG00000171860), ATP11C(ENSG00000101974), KCNIP3(ENSG00000115041), ATP1A2(ENSG00000018625), CIB1(ENSG00000185043), ADGRG6(ENSG00000112414), ASIC5(ENSG00000256394), CEACAM6(ENSG00000086548), DCXR(ENSG00000169738), AKAP10(ENSG00000108599), ARL4C(ENSG00000188042), ANO1(ENSG00000131620), ANXA13(ENSG00000104537), CHST14(ENSG00000169105), ARHGEF4(ENSG00000136002), ABHD12(ENSG00000100997), C12orf66(ENSG00000174206), CNPPD1(ENSG0000011S649), BLNK(ENSG00000095585), ALG14(ENSG00000172339), CEACAM3(ENSG00000170956), HTR2B(ENSG00000135914), B3GAT1(ENSG00000109956), CASQ1(ENSG00000143318), HHLA2(ENSG00000114455), MAOA(ENSG00000189221), CYP2C9(ENSG00000138109), DIP2A(ENSG00000160305), FGFR4(ENSG00000160867), IBTK(ENSG00000005700), SLC9A3R2(ENSG00000065054), NCEH1(ENSG00000144959), LRFN5(ENSG00000165379), MYZAP(ENSG00000263155), LHFPL2(ENSG00000145685), KCNN3(ENSG00000143603), MS4A18(ENSG00000214782), MC4R(ENSG00000166603), MS4A12(ENSG00000071203), MCUB(ENSG00000005059), EPPKl(ENSG00000261150), MSTO1(ENSG00000125459), SLC2A6(ENSG00000160326), KIAA2013(ENSG00000116685), NIPAL1(ENSG00000163293), SLC16A10(ENSG00000112394), IL17RA(ENSG00000177663), ITGB4(ENSG00000132470), LY9(ENSG00000122224), LYN(ENSG00000254087), GPA33(ENSG00000143167), ALOX12(ENSG00000108839), MUC13(ENSG00000173702), OR10R2(ENSG00000198965), MRC1(ENSG00000260314), NECAP2(ENSG00000157191), KLRC3(ENSG00000205810), HCAR2(ENSG00000182782), PRKCA(ENSG00000154229), PSKH1(ENSG00000159792), NDST2(ENSG00000166507), TGM2(ENSG00000198959), VSIG4(ENSG00000155659), SLC30A4(ENSG00000104154), EFNB3(ENSG00000108947), CD300C(ENSG00000167850), SLC22A15(ENSG00000163393), ST6GAL1(ENSG00000073849), SCEL(ENSG00000136155), AGER(ENSG00000204305), PLLP(ENSG00000102934), SLC18A2(ENSG00000165646), REEP2(ENSG00000132563), MGAT4B(ENSG00000161013), SCTR(ENSG00000080293), EHD2(ENSG00000024422), PPL(ENSG00000118898), CD84(ENSG00000066294), TMEM80(ENSG00000177042), RHOG(ENSG00000177105), TM4SF1(ENSG00000169908), STEAP1(ENSG00000164647), EHD1(ENSG00000110047), GJB4(ENSG00000189433), CD247(ENSG00000198821), CCR7(ENSG00000126353), CYB5A(ENSG00000166347), HCLS1(ENSG00000180353), AIFM2(ENSG00000042286), AIGl(ENSG00000146416), APBB1IP(ENSG00000077420), AQP4(ENSG00000171885), CYB561D1(ENSG00000174151), CACNA2D2(ENSG00000007402), ACE(ENSG00000159640), AQP3(ENSG00000165272), CADM1(ENSG00000182985), CXCR3(ENSG00000186810), LAMP3(ENSG00000078081), EHD3(ENSG00000013016), NSMF(ENSG00000165802), SLC34A2(ENSG00000157765), LRRK2(ENSG00000188906), TTYH3(ENSG00000136295), SUN3(ENSG00000164744), VPS52(ENSG00000223501), CLEC10A(ENSG00000132514), CD300C(ENSG00000167850), CD47(ENSG00000196776), MGAT4C(ENSG00000182050), PERP(ENSG00000112378), SNTG2(ENSG00000172554), ALPL(ENSG00000162551), TMPRSS11D(ENSG00000153802), SLC6A1(ENSG00000157103), SCEL(ENSG00000136155), SMURF1(ENSG00000198742), SEC13(ENSG00000157020), SLC41A2(ENSG00000136052), TMEM97(ENSG00000109084), MPP7(ENSG00000150054), RAC1(ENSG00000136238), RNF145(ENSG00000145860), ARHGAP5(ENSG00000100852), NFAMl(ENSG00000235568), SLC26A9(ENSG00000174502), RAC3(ENSG00000169750), RAB27B(ENSG00000041353), MTMR2(ENSG00000087053), MUC1(ENSG00000185499), REEP2(ENSG00000132563), KCNH8(ENSG00000183960), GPIHBPl(ENSG00000277494), SDC1(ENSG00000115884), LTBR(ENSG00000111321), TMEM45A(ENSG00000181458), MGAT4B(ENSG00000161013), TYROBP(ENSG00000011600), STYK1(ENSG00000060140), TMEM134(ENSG00000172663), SLC10A6(ENSG00000145283), MAPKAP1(ENSG00000119487), IFI27(ENSG00000165949), SGMS1(ENSG00000198964), MUC15(ENSG00000169550), OLFM2(ENSG00000105088), PROM2(ENSG00000155066), PLPP7(ENSG00000160539), KRT1(ENSG00000167768), PLA2G4E(ENSG00000188089), LRRN2(ENSG00000170382), DMPK(ENSG00000104936), OBSCN(ENSG00000154358), PPL(ENSG00000118898), TMEM79(ENSG00000163472), SLC7A7(ENSG00000155465), YRDC(ENSG00000196449), ZP2(ENSG00000103310), SYTL3(ENSG00000164674), TACSTD2(ENSG00000184292), PRRG2(ENSG00000126460), MSLN(ENSG00000102854), OCLN(ENSG00000197822), SPHK1(ENSG00000176170), SLC28A3(ENSG00000197506), S1PR5(ENSG00000180739), PTAFR(ENSG00000169403), RAB25(ENSG00000132698), SLC20A2(ENSG00000168575), SLC39A10(ENSG00000196950), STK16(ENSG00000115661), SLC19A1(ENSG00000173638), MARK2(ENSG00000072518), PNLDC1(ENSG00000146453), TRAF3IP3(ENSG00000009790), TAS2R38(ENSG00000257138), TMEM39B(ENSG00000121775), CLDN4(ENSG00000189143), CYBA(ENSG00000051523), GJB4(ENSG00000189433), KCNJ8(ENSG00000121361), SYK(ENSG00000165025), FA2H(ENSG00000103089), FPR1(ENSG00000171051), DSP(ENSG00000096696), ADCY10(ENSG00000143199), CDH6(ENSG00000113361), CD177(ENSG00000204936), GLP2R(ENSG00000065325), ANO7(ENSG00000146205), FYN(ENSG00000010810), DSC2(ENSG00000134755), GPX8(ENSG00000164294), CLDNS(ENSG00000184113), EPHA4(ENSG00000116106), HCAR3(ENSG00000255398), DSG2(ENSG00000046604), GPR39(ENSG00000183840), CD248(ENSG00000174807), CAPNS2(ENSG00000256812), HCN1(ENSG00000164588), DSC3(ENSG00000134762), GSDMA(ENSG00000167914), FGFBP1(ENSG00000137440), CTDNEP1(ENSG00000175826), FADS3(ENSG00000221968), FADS2(ENSG00000134824), B3GNT4(ENSG00000176383), DSG1(ENSG00000134760), ADGRF4(ENSG00000153294), BRI3(ENSG00000164713), ELOVL7(ENSG00000164181), MS4A1(ENSG00000156738), ASPRV1(ENSG00000244617), CIB1(ENSG00000185043), ASIC5(ENSG00000256394), DSG3(ENSG00000134757), DCXR(ENSG00000169738), AQP3(ENSG00000165272), CLEC2A(ENSG00000188393), CNPPD1(ENSG00000115649), BLNK(ENSG00000095585), MAOA(ENSG00000189221), IBTK(ENSG00000005700), MYZAP(ENSG00000263155), MC4R(ENSG00000166603), MCUB(ENSG00000005059), EPPKl(ENSG00000261150), FGFR3(ENSG00000068078), MSTO1(ENSG00000125459), NIPAL1(ENSG00000163293), ITGB4(ENSG00000132470), ALOX12(ENSG00000108839), OR10R2(ENSG00000198965), HCAR2(ENSG00000182782), PSKH1(ENSG00000159792), SLC30A4(ENSG00000104154), MS4A8(ENSG00000166959), PI4KB(ENSG00000143393), ULBP3(ENSG00000131019), GPR65(ENSG00000140030), RHBG(ENSG00000132677), PLLP(ENSG00000102934), DLC1(ENSG00000164741), PLN(ENSG00000198523), OSBPL7(ENSG00000006025), CD46(ENSG00000117335), ICAM3(ENSG00000076662), SLC25A15(ENSG00000102743), TMEM80(ENSG00000177042), TMEM143(ENSG00000161558), UNC13B(ENSG00000198722), RHCG(ENSG00000140519), TPRA1(ENSG00000163870), SNTB1(ENSG00000172164), SH2D3C(ENSG00000095370), RNF170(ENSG00000120925), RHOG(ENSG00000177105), RSAD2(ENSG00000134321), S100A8(ENSG00000143546), RAB11FIP5(ENSG00000135631), TM4SF1(ENSG00000169908), TRAF4(ENSG00000076604), MTG2(ENSG00000101181), SEMA5B(ENSG00000082684), ARHGAP27(ENSG00000159314), TSPAN15(ENSG00000099282), VTCN1(ENSG00000134258), TCTN3(ENSG00000119977), EHD1(ENSG00000110047), GSDMC(ENSG00000147697), CYB5A(ENSG00000166347), EVI2A(ENSG00000126860), FCGR2B(ENSG00000072694), CNTFR(ENSG00000122756), CEACAM5(ENSG00000105388), GPAT2(ENSG00000186281), CHST6(ENSG00000183196), DNER(ENSG00000187957), FGD2(ENSG00000146192), CPTP(ENSG00000224051), CXCRl(ENSG00000163464), FNBP1(ENSG00000187239), B3GNT8(ENSG00000177191), BASPl(ENSG00000176788), ATP9A(ENSG00000054793), CYB561D1(ENSG00000174151), CDH13(ENSG00000140945), AKAP10(ENSG00000108599),
ANO1(ENSG00000131620), CHST14(ENSG00000169105), AP4E1(ENSG00000081014), ALG14(ENSG00000172339), HTR2B(ENSG00000135914), NCEH1(ENSG00000144959), LHFPL2(ENSG00000145685), MUC21(ENSG00000204544), EHD3(ENSG00000013016), IL17RA(ENSG00000177663), NECAP2(ENSG00000157191), (), UPK1B(ENSG00000114638), CLEC10A(ENSG00000132514), CREB3L3(ENSG00000060566), PI4KB(ENSG00000143393), SLC6A4(ENSG00000108576), SLC25A40(ENSG00000075303), SLCO1B3(ENSG00000111700), SLCO1B1(ENSG00000134538), SLC25A43(ENSG00000077713), SLC27A5(ENSG00000083807), MTMR2(ENSG00000087053), PTGDR2(ENSG00000183134), PDZK1(ENSG00000174827), RDH16(ENSG00000139547), LIN7A(ENSG00000111052), PRRT2(ENSG00000167371), OLFM2(ENSG00000105088), NAT8(ENSG00000144035), PNPLA3(ENSG00000100344), SLC25A15(ENSG00000102743), YIPFl(ENSG00000058799), TFR2(ENSG00000106327), UGT1A6(ENSG00000167165), TNS2(ENSG00000111077), ST7L(ENSG00000007341), SLCO2B1(ENSG00000137491), TEX261(ENSG00000144043), TSPAN2(ENSG00000134198), GLRB(ENSG00000109738), CYP2D6(ENSG00000100197), FYN(ENSG00000010810), GAS2(ENSG00000148935), SLC2A2(ENSG00000163581), CYP2A7(ENSG00000198077), FOLH1(ENSG00000086205), CYP1A2(ENSG00000140505), CYP3A4(ENSG00000160868), CYP4V2(ENSG00000145476), NINJ1(ENSG00000131669), CYP2C8(ENSG00000138115), DHCR24(ENSG00000116133), MAL2(ENSG00000147676), CYP2C19(ENSG00000165841), AQP9(ENSG00000103569), ASGR1(ENSG00000141505), ADRA2B(ENSG00000274286), ABCB11(ENSG00000073734), CMKLR1(ENSG00000174600), ACAD11(ENSG00000240303), BACE2(ENSG00000182240), CD320(ENSG00000167775), ASGR2(ENSG00000161944), PIK3AP1(ENSG00000155629), CYP3A43(ENSG00000021461), INTS2(ENSG00000108506), MOXD1(ENSG00000079931), MFAP3L(ENSG00000198948), KCND1(ENSG00000102057), GPR15(ENSG00000154165), SLC2A8(ENSG00000136856), ABCC2(ENSG00000023839), DPP4(ENSG00000197635), NPC1L1(ENSG00000015520), ZDHHC16(ENSG00000171307), CD47(ENSG00000196776), SLC45A1(ENSG00000162426), PODXL(ENSG00000128567), PECAM1(ENSG00000261371), SCUBE1(ENSG00000159307), PLA2R1(ENSG00000153246), MAP6(ENSG00000171533), MPP5(ENSG00000072415), NPHS2(ENSG00000116218), TSPAN7(ENSG00000156298), THSD7A(ENSG00000005108), PITPNM3(ENSG00000091622), PTPRO(ENSG00000151490), HYAL2(ENSG00000068001), CDH6(ENSG00000113361), CD93(ENSG00000125810), FAM107A(ENSG00000168309), CD34(ENSG00000174059), EVI2A(ENSG00000126860), ENG(ENSG00000106991), CD248(ENSG00000174807), DOCKS(ENSG00000147459), CR1(ENSG00000203710), FGD2(ENSG00000146192), FNBP1(ENSG00000187239), ACKR1(ENSG00000213088), CDH13(ENSG00000140945), SUN3(ENSG00000164744), TRPM3(ENSG00000083067), TBC1D3G(ENSG00000260287), TREH(ENSG00000118094), THY1(ENSG00000154096), SELPLG(ENSG00000110876), TMEM240(ENSG00000205090), SLC5A12(ENSG00000148942), SLC12A1(ENSG00000074803), SLC4A10(ENSG00000144290), SLC6A19(ENSG00000174358), SLC22A11(ENSG00000168065), S1PR2(ENSG00000267534), SLC28A2(ENSG00000137860), RDH11(ENSG00000072042), RHBG(ENSG00000132677), VHL(ENSG00000134086), PDE2A(ENSG00000186642), RALB(ENSG00000144118), LTBR(ENSG00000111321), TMEM132E(ENSG00000181291), NOS1(ENSG00000089250), NTRK2(ENSG00000148053), RFTN2(ENSG00000162944), SLC22A6(ENSG00000197901), UGT3A1(ENSG00000145626), ATP6V0A4(ENSG00000105929), TMEM252(ENSG00000181778), TMEM174(ENSG00000164325), RHCG(ENSG00000140519), FASLG(ENSG00000117560), SLC28A1(ENSG00000156222), SNTB1(ENSG00000172164), SIRT2(ENSG00000068903), SLC22A2(ENSG00000112499), SH2D3C(ENSG00000095370), SLC22A8(ENSG00000149452), RAB11FIP5(ENSG00000135631), SLC6A18(ENSG00000164363), SLC13A2(ENSG00000007216), TMEM213(ENSG00000214128), SLC5A1(ENSG00000100170), SYT7(ENSG00000011347), SLC4A4(ENSG00000080493), TMEM178B(ENSG00000261115), PKHD1(ENSG00000170927), SLC35G2(ENSG00000168917), TSPAN16(ENSG00000130167), ENPP6(ENSG00000164303), EMC4(ENSG00000128463), IYD(ENSG00000009765), ENPP3(ENSG00000154269), CUBN(ENSG00000107611), DLK1(ENSG00000185559), GSDMC(ENSG00000147697), KIRREL2(ENSG00000126259), CPNE6(ENSG00000100884), JAKMIP1(ENSG00000152969), CLTRN(ENSG00000147003), CPT1C(ENSG00000169169), CLCNKB(ENSG00000184908), ADGRG5(ENSG00000159618), CALCR(ENSG00000004948), CLCNKA(ENSG00000186510), FAM169A(ENSG00000198780), GPR39(ENSG00000183840), CASR(ENSG00000036828), GLIPR1L2(ENSG00000180481), LPXN(ENSG00000110031), KIAA0319(ENSG00000137261), LRFN4(ENSG00000173621), AQP6(ENSG00000086159), DSG1(ENSG00000134760), NPR3(ENSG00000113389), CDC42SE1(ENSG00000197622), ADAM28(ENSG00000042980), SLC7A9(ENSG00000021488), CLDN10(ENSG00000134873), DUSP15(ENSG00000149599), FXYD2(ENSG00000137731), CLDN2(ENSG00000165376), ANO5(ENSG00000171714), AP4E1(ENSG00000081014), CDH16(ENSG00000166589), LRFN2(ENSG00000156564), KCNJ10(ENSG00000177807), KCNJ12(ENSG00000184185), MS4A4A(ENSG00000110079), FMO1(ENSG00000010932), LRP2(ENSG00000081479), IL23R(ENSG00000162594), GRIN2D(ENSG00000105464), MDGA2(ENSG00000139915), KCTD8(ENSG00000183783), SLC27A6(ENSG00000113396), SPAG4(ENSG00000061656), UCP3(ENSG00000175564), RASL10B(ENSG00000270885), POPDC2(ENSG00000121577), PLN(ENSG00000198523), GPIHBP1(ENSG00000277494), INPP5D(ENSG00000168918), SGCG(ENSG00000102683), SRL(ENSG00000185739), ART3(ENSG00000156219), KLHL41(ENSG00000239474), DMPK(ENSG00000104936), YRDC(ENSG00000196449), TREML1(ENSG00000161911), RAB11FIP4(ENSG00000131242), RYR1(ENSG00000196218), SLAMF8(ENSG00000158714), SEMA5B(ENSG00000082684), MMP27(ENSG00000137675), DSP(ENSG00000096696), CDH15(ENSG00000129910), ADRA1A(ENSG00000120907), GPX8(ENSG00000164294), CAVIN4(ENSG00000170681), FCGR2B(ENSG00000072694), CHRNA1(ENSG00000138435), GPAT2(ENSG00000186281), LEPROTL1(ENSG00000104660), B3GNT4(ENSG00000176383), CSF3R(ENSG00000119535), ADRB1(ENSG00000043591), JPH1(ENSG00000104369), GPR182(ENSG00000166856), MCEMP1(ENSG00000183019), DES(ENSG00000175084), TMEM100(ENSG00000166292), SLITRK4(ENSG00000179542), SLC5A5(ENSG00000105641), KCNQ5(ENSG00000185760), TPO(ENSG00000115705), PSD3(ENSG00000156011), PORCN(ENSG00000102312), C19orfl8(ENSG00000177025), DUOX1(ENSG00000137857), EPHX4(ENSG00000172031), FCRL1(ENSG00000163534), HCN1(ENSG00000164588), IPCEF1(ENSG00000074706), ADD2(ENSG00000075340), BASP1(ENSG00000176788), AAK1(ENSG00000115977), CRHR1(ENSG00000120088), CDH10(ENSG00000040731), LRP1B(ENSG00000168702), RAB3A(ENSG00000105649), RTN1(ENSG00000139970), SCG3(ENSG00000104112), POMGNT2(ENSG00000144647), PTPRN(ENSG00000054356), NECAB2(ENSG00000103154), SLC17A6(ENSG00000091664), SV2A(ENSG00000159164), SLC30A8(ENSG00000164756), MAPK10(ENSG00000109339), DGCR2(ENSG00000070413), GNAO1(ENSG00000087258), CLU(ENSG00000120885), AMPH(ENSG00000078053), GAD2(ENSG00000136750), ALOX5(ENSG00000012779), TBC1D3D(ENSG00000274419), TMEM97(ENSG00000109084), SEC16B(ENSG00000120341), UNC13D(ENSG00000092929), TRAT1(ENSG00000163519), TBC1D3E(ENSG00000278599), TACSTD2(ENSG00000184292), SYCN(ENSG00000179751), SLC19A1(ENSG00000173638), CUZD1(ENSG00000138161), GP2(ENSG00000169347), FA2H(ENSG00000103089), CYSTM1(ENSG00000120306), CDH9(ENSG00000113100), CFTR(ENSG00000001626), CHST4(ENSG00000140835), AQP12A(ENSG00000184945), AQP12B(ENSG00000185176), TMEM158(ENSG00000249992), UGT2A3(ENSG00000135220), CACNB2(ENSG00000165995), CORO7(ENSG00000262246), ABCD4(ENSG00000119688), GABARAPL2(ENSG00000034713), UBE2J1(ENSG00000198833), SYT13(ENSG00000019505), PLSCR4(ENSG00000114698), SPCS1(ENSG00000114902), TNFSF12(ENSG00000239697), BVES(ENSG00000112276), P2RX6(ENSG00000099957), PLEKHA3(ENSG00000116095), TVP23B(ENSG00000171928),
WHAMM(ENSG00000156232), PTPRD(ENSG00000153707), MED28(ENSG00000118579), PTPRT(ENSG00000196090), MRGPRF(ENSG00000172935), SPATA9(ENSG00000145757), SLCO4A1(ENSG00000101187), SLC9A3(ENSG00000066230), ADCYAP1R1(ENSG00000078549), MRGPRX2(ENSG00000183695), PCDH11X(ENSG00000102290), PALM(ENSG00000099864), VEPH1(ENSG00000197415), PRKAR2B(ENSG00000005249), CNEP1R1(ENSG00000205423), SORD(ENSG00000140263), GOLGA2(ENSG00000167110), AATK(ENSG00000181409), SPRED1(ENSG00000166068), SLC26A3(ENSG00000091138), UGT2B17(ENSG00000197888), SERAC1(ENSG00000122335), TVP23C(ENSG00000175106), UGT2B28(ENSG00000135226), VAC14(ENSG00000103043), QTRT1(ENSG00000213339), TSPAN13(ENSG00000106537), TMEM253(ENSG00000232070), TBCD(ENSG00000141556), UGT2B15(ENSG00000196620), ARHGAP17(ENSG00000140750), SEZ6(ENSG00000063015), C2orf88(ENSG00000187699), GOPC(ENSG00000047932), SNX6(ENSG00000129515), PHACTR2(ENSG00000112419), RAB29(ENSG00000117280), NAPG(ENSG00000134265), PHLPP2(ENSG00000040199), PRRT3(ENSG00000163704), SLC35B1(ENSG00000121073), NAPB(ENSG00000125814), TMEM154(ENSG00000170006), TMEM171(ENSG00000157111), TMEM30A(ENSG00000112697), CLSTN1(ENSG00000171603), FCER1A(ENSG00000179639), IL9R(ENSG00000124334), SLC2A12(ENSG00000146411), CEACAM1(ENSG00000079385), FPR2(ENSG00000171049), FKBP2(ENSG00000173486), GRK5(ENSG00000198873), CHDH(ENSG00000016391), FAM126B(ENSG00000155744), HTR1A(ENSG00000178394), GLT8D2(ENSG00000120820), ENOX2(ENSG00000165675), GATM(ENSG00000171766), FLNC(ENSG00000128591), GCHFR(ENSG00000137880), AADAC(ENSG00000114771), DIAPH1(ENSG00000131504), ADGRE1(ENSG00000174837), CHODL(ENSG00000154645), CA12(ENSG00000074410), DPP10(ENSG00000175497), DGKQ(ENSG00000145214), GBP2(ENSG00000162645), LRRC37B(ENSG00000185158), AP3M1(ENSG00000185009), ABHD16A(ENSG00000204427), ANKRD27(ENSG00000105186), ANO8(ENSG00000074855), AQP1(ENSG00000240583), MPP1(ENSG00000130830), CDC42EP1(ENSG00000128283), UGCG(ENSG00000148154), ENPEP(ENSG00000138792), CLDN11(ENSG00000013297), ARRB1(ENSG00000137486), CADPS(ENSG00000163618), C5AR2(ENSG00000134830), ARRDC1(ENSG00000197070), AP1S3(ENSG00000152056), EPB41L3(ENSG00000082397), ADGRV1(ENSG00000164199), EBP(ENSG00000147155), HSD3B7(ENSG00000099377), ABCC5(ENSG00000114770), SMPD4(ENSG00000136699), HMOX1(ENSG00000100292), SLC16A6(ENSG00000108932), NDUFS1(ENSG00000023228), GFRA2(ENSG00000168546), GNG12(ENSG00000172380), GLRA2(ENSG00000101958), MAP2K1(ENSG00000169032), NIPA2(ENSG00000140157), IGFLR1(ENSG00000126246), GAL3ST1(ENSG00000128242), DPY19L1(ENSG00000173852), RPS6KC1(ENSG00000136643), TRIM13(ENSG00000204977), SLC25A17(ENSG00000100372), TGFBR3(ENSG00000069702), SEMA4F(ENSG00000135622), NUS1(ENSG00000153989), PTPRG(ENSG00000144724), SGIP1(ENSG00000118473), KIRREL3(ENSG00000149571), TBC1D3(ENSG00000274611), P2RY2(ENSG00000175591), PSD4(ENSG00000125637), RYK(ENSG00000163785), SIGLEC9(ENSG00000129450), EHD4(ENSG00000103966), SLC44A2(ENSG00000129353), AOC3(ENSG00000131471), FES(ENSG00000182511), L1CAM(ENSG00000198910), ELMO2(ENSG00000062598), BSN(ENSG00000164061), BDKRB2(ENSG00000168398), LDLRAD2(ENSG00000187942), PI4KA(ENSG00000241973), CACNB2(ENSG00000165995), ABCD4(ENSG00000119688), GABARAPL2(ENSG00000034713), SOX10(ENSG00000100146), SLC25A17(ENSG00000100372), TGFBR3(ENSG00000069702), SPCS1(ENSG00000114902), TNFSF12(ENSG00000239697), NEGR1(ENSG00000172260), NUS1(ENSG00000153989), SLC9A3(ENSG00000066230), LANCL2(ENSG00000132434), PALM(ENSG00000099864), LAX1(ENSG00000122188), VEPH1(ENSG00000197415), SORD(ENSG00000140263), GOLGA2(ENSG00000167110), AATK(ENSG00000181409), TRPM2(ENSG00000142185), RMC1(ENSG00000141452), SERAC1(ENSG00000122335), VAC14(ENSG00000103043), TBCD(ENSG00000141556), UGT2B15(ENSG00000196620), P2RY2(ENSG00000175591), ARHGAP17(ENSG00000140750), C2orf88(ENSG00000187699), GOPC(ENSG00000047932), PHACTR2(ENSG00000112419), RAB29(ENSG00000117280), RYK(ENSG00000163785), PRRT3(ENSG00000163704), NAPB(ENSG00000125814), SIGLEC9(ENSG00000129450), TMEM171(ENSG00000157111), TMEM30A(ENSG00000112697), CACNA2D1(ENSG00000153956), FPR2(ENSG00000171049), FKBP2(ENSG00000173486), GRK5(ENSG00000198873), FAM126B(ENSG00000155744), GLT8D2(ENSG00000120820), ENOX2(ENSG00000165675), GATM(ENSG00000171766), AADAC(ENSG00000114771), CD99(ENSG00000002586), CA12(ENSG00000074410), MALL(ENSG00000144063), DGKQ(ENSG00000145214), GBP2(ENSG00000162645), LRRC37B(ENSG00000185158), L1CAM(ENSG00000198910), AP3M1(ENSG00000185009), ANKRD27(ENSG00000105186), CDC42EP1(ENSG00000128283), CD81(ENSG00000110651), BST1(ENSG00000109743), ARRB1(ENSG00000137486), CD1D(ENSG00000158473), ADGRV1(ENSG00000164199), HSD3B7(ENSG00000099377), ABCCS(ENSG00000114770), GNG12(ENSG00000172380), MAP2K1(ENSG00000169032), NIPA2(ENSG00000140157), LDLRAD2(ENSG00000187942), RPS6KC1(ENSG00000136643), CHL1(ENSG00000134121), PI4KA(ENSG00000241973), NCS1(ENSG00000107130), TCTN2(ENSG00000168778), CORO7(ENSG00000262246), TRIM13(ENSG00000204977), UBE2J1(ENSG00000198833), SYT13(ENSG00000019505), TYR(ENSG00000077498), WIPI2(ENSG00000157954), MPP6(ENSG00000105926), PTPRT(ENSG00000196090), SLCO4A1(ENSG00000101187), KCNQ4(ENSG00000117013), SGIP1(ENSG00000118473), PRKAR2B(ENSG00000005249), SPRED1(ENSG00000166068), QTRT1(ENSG00000213339), TSPAN13(ENSG00000106537), TBC1D3(ENSG00000274611), DCT(ENSG00000080166), ZC4H2(ENSG00000126970), NAPG(ENSG00000134265), PMEL(ENSG00000185664), PHLPP2(ENSG00000040199), DTL(ENSG00000143476), CNTN3(ENSG00000113805), CLSTN1(ENSG00000171603), FCER1A(ENSG00000179639), EHD4(ENSG00000103966), ADCY7(ENSG00000121281), TM7SF2(ENSG00000149809), CYB561A3(ENSG00000162144), DIAPH1(ENSG00000131504), FAM210A(ENSG00000177150), ADGRE1(ENSG00000174837), CD82(ENSG00000085117), PROCR(ENSG00000101000), UGCG(ENSG00000148154), ELMO2(ENSG00000062598), CPNE2(ENSG00000140848), BDKRB2(ENSG00000168398), ADGRA1(ENSG00000197177), NDUFS1(ENSG00000023228), GFRA2(ENSG00000168546), VNN1(ENSG00000112299), SVEP1(ENSG00000165124), NEGR1(ENSG00000172260), KSR2(ENSG00000171435), KCNQ4(ENSG00000117013), MME(ENSG00000196549), ZDHHC13(ENSG00000177054), SLC25A25(ENSG00000148339), CACNA2D1(ENSG00000153956), CREB3L2(ENSG00000182158), HEPACAM(ENSG00000165478), FAM210A(ENSG00000177150), FMO3(ENSG00000007933), MALL(ENSG00000144063), ABCB4(ENSG00000005471), KMO(ENSG00000117009), BCL2L10(ENSG00000137875), CTSL(ENSG00000135047), HSD11B1(ENSG00000117594), LIMS2(ENSG00000072163), SLC10A1(ENSG00000100652), ZAP70(ENSG00000115085), KDR(ENSG00000128052), MAPT(ENSG00000186868), KIRREL1(ENSG00000183853), SLC34A1(ENSG00000131183), PTH2R(ENSG00000144407), NKD1(ENSG00000140807), RMC1(ENSG00000141452), TTC7B(ENSG00000165914), STK10(ENSG00000072786), SNCA(ENSG00000145335), PEAR1(ENSG00000187800), RTL1(ENSG00000254656), CD99(ENSG00000002586), MAS1(ENSG00000130368), ADGRL4(ENSG00000162618), CHRM1(ENSG00000168539), SLC43A2(ENSG00000167703), ITGA8(ENSG00000077943), MLIP(ENSG00000146147), PDGFRA(ENSG00000134853), SLC5A2(ENSG00000140675), STIMATE(ENSG00000213533), TLN2(ENSG00000171914), PCDHB2(ENSG00000112852), SCNN1D(ENSG00000162572), SLC34A3(ENSG00000198569), PTH1R(ENSG00000160801), WIPI2(ENSG00000157954), MPP6(ENSG00000105926), PRICKLE1(ENSG00000139174), TRPM2(ENSG00000142185), XPNPEP2(ENSG00000122121), SLC13A3(ENSG00000158296), OPRD1(ENSG00000116329), CLSTN2(ENSG00000158258), CKMT2(ENSG00000131730), ADCY7(ENSG00000121281), FAM151A(ENSG00000162391), FNDC5(ENSG00000160097), DOCK2(ENSG00000134516),
TM7SF2(ENSG00000149809), FRRS1L(ENSG00000260230), EPHB1(ENSG00000154928), BSND(ENSG00000162399), BST1(ENSG00000109743), CATIP(ENSG00000158428), CPT1B(ENSG00000205560), COX7B(ENSG00000131174), CPNE2(ENSG00000140848), C5AR1(ENSG00000197405), FAM234B(ENSG00000084444), MFSD1(ENSG00000118855), CHL1(ENSG00000134121), TCTN2(ENSG00000168778), CAP2(ENSG00000112186), SGCB(ENSG00000163069), P2RY6(ENSG00000171631), SHISA4(ENSG00000198892), FLT1(ENSG00000102755), LANCL2(ENSG00000132434), SIPA1(ENSG00000213445), ZC4H2(ENSG00000126970), CNTN3(ENSG00000113805), SLC2A4(ENSG00000181856), HHATL(ENSG00000010282), CYB561A3(ENSG00000162144), CAMK2B(ENSG00000058404), MBOAT7(ENSG00000125505), FCGRT(ENSG00000104870), DMD(ENSG00000198947), CD81(ENSG00000110651), CD1D(ENSG00000158473), AKAP6(ENSG00000151320), NCAM1(ENSG00000149294), IL18RAP(ENSG00000115607), VPS33B(ENSG00000184056), RTP5(ENSG00000188011), RNFT2(ENSG00000135119), PROCR(ENSG00000101000), AP3B2(ENSG00000103723), MTNR1B(ENSG00000134640), NCS1(ENSG00000107130), SHISAL2B(ENSG00000145642), FBXO2(ENSG00000116661), CD82(ENSG00000085117), NEURL1(ENSG00000107954), DTL(ENSG00000143476), TRDN(ENSG00000186439), TJAP1(ENSG00000137221), TMEM138(ENSG00000149483), TECR(ENSG00000099797), TMEM237(ENSG00000155755), TMCC1(ENSG00000172765), SLC7A6(ENSG00000103064), ATP8B2(ENSG00000143515), SLC46A1(ENSG00000076351), ST3GAL6(ENSG00000064225), SLC14A1(ENSG00000141469), TMEM106B(ENSG00000106460), RHOV(ENSG00000104140), LPCAT2(ENSG00000087253), SLC5A6(ENSG00000138074), SUSD3(ENSG00000157303), SLC6A6(ENSG00000131389), PITPNM1(ENSG00000110697), PEX1(ENSG00000127980), PEMT(ENSG00000133027), NPDC1(ENSG00000107281), NTRK1(ENSG00000198400), RALGPS2(ENSG00000116191), GOLGA8B(ENSG00000215252), GRIK2(ENSG00000164418), PCDHGA10(ENSG00000253846), RHOF(ENSG00000139725), HRAS(ENSG00000174775), PLA2G4F(ENSG00000168907), PILRA(ENSG00000085514), PKHD1L1(ENSG00000205038), RGS16(ENSG00000143333), USP8(ENSG00000138592), VPS26B(ENSG00000151502), YIF1B(ENSG00000167645), RHBDL2(ENSG00000158315), SLC25A20(ENSG00000178537), PLA2G2A(ENSG00000188257), KRAS(ENSG00000133703), STXBP6(ENSG00000168952), NRAS(ENSG00000213281), TENM3(ENSG00000218336), STXBP3(ENSG00000116266), TAOK2(ENSG00000149930), MITD1(ENSG00000158411), PRSS8(ENSG00000052344), GNPNAT1(ENSG00000100522), LRRC55(ENSG00000183908), NUTF2(ENSG00000102898), KCNQ1(ENSG00000053918), SLC8A1(ENSG00000183023), NAALADL2(ENSG00000177694), NECTIN1(ENSG00000110400), LDLRAD3(ENSG00000179241), NALCN(ENSG00000102452), SLC51B(ENSG00000186198), SLC43A3(ENSG00000134802), SELENOT(ENSG00000198843), SLC9A1(ENSG00000090020), ST7(ENSG00000004866), SNTA1(ENSG00000101400), SCARF1(ENSG00000074660), TUB(ENSG00000166402), TEX264(ENSG00000164081), TM4SF20(ENSG00000168955), TMEM119(ENSG00000183160), ZNRF1(ENSG00000186187), TMEM69(ENSG00000159596), ZFYVE9(ENSG00000157077), SLC35A3(ENSG00000117620), PCDH1(ENSG00000156453), RNF125(ENSG00000101695), TMTC4(ENSG00000125247), QPCTL(ENSG00000011478), SLC45A4(ENSG00000022567), RAB27A(ENSG00000069974), SLC12A6(ENSG00000140199), SORT1(ENSG00000134243), PARD3B(ENSG00000116117), SMIM6(ENSG00000259120), MIA3(ENSG00000154305), STK17B(ENSG00000081320), SSTR1(ENSG00000139874), TMEM204(ENSG00000131634), PPM1L(ENSG00000163590), SNX18(ENSG00000178996), SLC23A1(ENSG00000170482), SH3KBP1(ENSG00000147010), PIK3R5(ENSG00000141506), RHOU(ENSG00000116574), SLC4A5(ENSG00000188687), MSMO1(ENSG00000052802), TMIGD2(ENSG00000167664), TYRO3(ENSG00000092445), TRPC6(ENSG00000137672), ZBED3(ENSG00000132846), PRKCZ(ENSG00000067606), EMC9(ENSG00000100908), FAM83B(ENSG00000168143), FKRP(ENSG00000181027), FMOS(ENSG00000131781), EMC6(ENSG00000127774), KCTD3(ENSG00000136636), ARHGEF1(ENSG00000076928), GOLPH3(ENSG00000113384), ATP2C2(ENSG00000064270), ABCG2(ENSG00000118777), GPC5(ENSG00000179399), DCBLD1(ENSG00000164465), EPHB3(ENSG00000182580), CYP4F12(ENSG00000186204), CYP4F3(ENSG00000186529), CAPRIN2(ENSG00000110888), DGKE(ENSG00000153933), GCSAM(ENSG00000174500), CALN1(ENSG00000183166), CYP4F11(ENSG00000171903), GBF1(ENSG00000107862), DMTN(ENSG00000158856), GOLGA8A(ENSG00000175265), ATP11B(ENSG00000058063), WDPCP(ENSG00000143951), CNR1(ENSG00000118432), ARFGEF3(ENSG00000112379), CARMIL2(ENSG00000159753), CHMP5(ENSG00000086065), KPNA2(ENSG00000182481), FAM241B(ENSG00000171224), GDAP1(ENSG00000104381), GPR82(ENSG00000171657), IGSF11(ENSG00000144847), IL17RC(ENSG00000163702), EVA1B(ENSG00000142694), SLC7A8(ENSG00000092068), LPP(ENSG00000145012), EPHA10(ENSG00000183317), ATP5F1C(ENSG00000165629), CYP4F2(ENSG00000186115), KDELR3(ENSG00000100196), FERMT1(ENSG00000101311), ABCA10(ENSG00000154263), CD300LF(ENSG00000186074), CDH5(ENSG00000179776), DTX3L(ENSG00000163840), CYB561(ENSG00000008283), SLC25A31(ENSG00000151475), ATP2A2(ENSG00000174437), AVEN(ENSG00000169857), CERS6(ENSG00000172292), CD300A(ENSG00000167851), CXADR(ENSG00000154639), GRAMD1A(ENSG00000089351), ORAI1(ENSG00000276045), ACKR2(ENSG00000144648), CHST5(ENSG00000135702), B3GNT7(ENSG00000156966), CHMP2B(ENSG00000083937), ALDH3A2(ENSG00000072210), NISCH(ENSG00000010322), GIPC1(ENSG00000123159), GPR153(ENSG00000158292), FUT3(ENSG00000171124), GLUL(ENSG00000135821), HSP90AA1(ENSG00000080824), IL17RE(ENSG00000163701), KIAA1109(ENSG00000138688), MARCKSL1(ENSG00000175130), MTCH2(ENSG00000109919), EFHD2(ENSG00000142634), FUT6(ENSG00000156413), GPER1(ENSG00000164850), SLC2A3(ENSG00000059804), HCN3(ENSG00000143630), MBTPS1(ENSG00000140943), JAML(ENSG00000160593), GPC1(ENSG00000063660), LZTR1(ENSG00000099949), NFXL1(ENSG00000170448), MYOC(ENSG00000034971), NEU4(ENSG00000204099), MUC4(ENSG00000145113), NAPEPLD(ENSG00000161048), IL4R(ENSG00000077238), TRPV6(ENSG00000165125), STX5(ENSG00000162236), S100A9(ENSG00000163220), ECEL1(ENSG00000171551), CLDN18(ENSG00000066405), EPHX1(ENSG00000143819), CCDC88A(ENSG00000115355), CLIC2(ENSG00000155962), DGKZ(ENSG00000149091), GALNT13(ENSG00000144278), TMEM243(ENSG00000135185), TRDN(ENSG00000186439), TJAP1(ENSG00000137221), TMEM138(ENSG00000149483), TMEM237(ENSG00000155755), TMCC1(ENSG00000172765), ST3GAL6(ENSG00000064225), STRA6(ENSG00000137868), RXFP1(ENSG00000171509), RHOV(ENSG00000104140), SLC5A6(ENSG00000138074), SLC6A6(ENSG00000131389), PITPNM1(ENSG00000110697), NPDC1(ENSG00000107281), RALGPS2(ENSG00000116191), GRIK2(ENSG00000164418), NTM(ENSG00000182667), PTGS2(ENSG00000073756), PKHD1L1(ENSG00000205038), RGS16(ENSG00000143333), TMEM40(ENSG00000088726), VPS26B(ENSG00000151502), RHBDL2(ENSG00000158315), STX5(ENSG00000162236), PCDH19(ENSG00000165194), TENM3(ENSG00000218336), STXBP3(ENSG00000116266), TAOK2(ENSG00000149930), MITD1(ENSG00000158411), NEU3(ENSG00000162139), KCNAB1(ENSG00000169282), LRRC55(ENSG00000183908), NUTF2(ENSG00000102898), LYPD3(ENSG00000124466), SLC8A1(ENSG00000183023), NAALADL2(ENSG00000177694), NECTIN1(ENSG00000110400), SLC43A3(ENSG00000134802), SELENOT(ENSG00000198843), SLC9A1(ENSG00000090020), SNTA1(ENSG00000101400), SRC(ENSG00000197122), TUB(ENSG00000166402), ZNRF1(ENSG00000186187), TMEM69(ENSG00000159596), THBD(ENSG00000178726), SLC35A3(ENSG00000117620), RNF125(ENSG00000101695), TMTC4(ENSG00000125247), QPCTL(ENSG00000011478), SLC45A4(ENSG00000022567), PARD3B(ENSG00000116117), SMIM6(ENSG00000259120), MIA3(ENSG00000154305), NGFR(ENSG00000064300), SSTR1(ENSG00000139874), TMEM204(ENSG00000131634), SNX18(ENSG00000178996), SNORC(ENSG00000182600), SH3KBP1(ENSG00000147010),
LY6D(ENSG00000167656), S100A9(ENSG00000163220), RHOU(ENSG00000116574), SELENOK(ENSG00000113811), MSMO1(ENSG00000052802), RIPK4(ENSG00000183421), TYRO3(ENSG00000092445), TRPC6(ENSG00000137672), COL17A1(ENSG00000065618), EMC9(ENSG00000100908), FAM83B(ENSG00000168143), ARHGEF1(ENSG00000076928), CYP2W1(ENSG00000073067), ATP2C2(ENSG00000064270), GPC5(ENSG00000179399), DCBLD1(ENSG00000164465), FRS3(ENSG00000137218), EPHB3(ENSG00000182580), CYP4F12(ENSG00000186204), CYP4F3(ENSG00000186529), GPR84(ENSG00000139572), CALN1(ENSG00000183166), DMTN(ENSG00000158856), FAT2(ENSG00000086570), IL1RAP(ENSG00000196083), WDPCP(ENSG00000143951), ARFGEF3(ENSG00000112379), CARMIL2(ENSG00000159753), KPNA2(ENSG00000182481), GDAP1(ENSG00000104381), DEF6(ENSG00000023892), EVA1B(ENSG00000142694), SLC7A8(ENSG00000092068), LPP(ENSG00000145012), EPHA10(ENSG00000183317), KDELR3(ENSG00000100196), FERMT1(ENSG00000101311), ABCA10(ENSG00000154263), CCR2(ENSG00000121807), CDH5(ENSG00000179776), DTX3L(ENSG00000163840), CYB561(ENSG00000008283), SLC25A31(ENSG00000151475), AVEN(ENSG00000169857), CAV3(ENSG00000182533), CXADR(ENSG00000154639), ORAI1(ENSG00000276045), ACSBG1(ENSG00000103740), ACKR2(ENSG00000144648), ATP12A(ENSG00000075673), ALDH3A2(ENSG00000072210), KCNJ11(ENSG00000187486), NISCH(ENSG00000010322), GIPC1(ENSG00000123159), GPR153(ENSG00000158292), IL17RE(ENSG00000163701), KIAA1109(ENSG00000138688), MARCKSL1(ENSG00000175130), GPER1(ENSG00000164850), TACR1(ENSG00000115353), GPC1(ENSG00000063660), IL4R(ENSG00000077238), TMEM243(ENSG00000135185), TECR(ENSG00000099797), LPCAT2(ENSG00000087253), SUSD3(ENSG00000157303), PEMT(ENSG00000133027), NTRK1(ENSG00000198400), GOLGA8B(ENSG00000215252), HRAS(ENSG00000174775), PLA2G4F(ENSG00000168907), USP8(ENSG00000138592), YIF1B(ENSG00000167645), KRAS(ENSG00000133703), RASA4(ENSG00000105808), NRAS(ENSG00000213281), TECTA(ENSG00000109927), GNPNAT1(ENSG00000100522), KCNQ1(ENSG00000053918), ST7(ENSG00000004866), SMIM18(ENSG00000253457), TMEM119(ENSG00000183160), PRNP(ENSG00000171867), PCDH1(ENSG00000156453), STK17B(ENSG00000081320), TMIGD2(ENSG00000167664), UPK3A(ENSG00000100373), KCTD3(ENSG00000136636), IGSF3(ENSG00000143061), GBF1(ENSG00000107862), GOLGA8A(ENSG00000175265), CNR1(ENSG00000118432), FAM241B(ENSG00000171224), IGSF11(ENSG00000144847), IL17RC(ENSG00000163702), ATP5F1C(ENSG00000165629), DGKZ(ENSG00000149091), ATP2A2(ENSG00000174437), CERS6(ENSG00000172292), ATG2A(ENSG00000110046), B3GNT7(ENSG00000156966), CHMP2B(ENSG00000083937), LHFPL6(ENSG00000183722), EFHD2(ENSG00000142634), JAML(ENSG00000160593), KIT(ENSG00000157404), LZTR1(ENSG00000099949), KIAA0040(ENSG00000235750), STRA6(ENSG00000137868), SYNE3(ENSG00000176438), RASA4(ENSG00000105808), PCDH19(ENSG00000165194), RFTN1(ENSG00000131378), TM4SF4(ENSG00000169903), CYP2W1(ENSG00000073067), GJA5(ENSG00000265107), CACNA1A(ENSG00000141837), CYP2A6(ENSG00000255974), GPRC5B(ENSG00000167191), GPAM(ENSG00000119927), CYP2A13(ENSG00000197838), CYP2E1(ENSG00000130649), EPB41L5(ENSG00000115109), ATG2A(ENSG00000110046), KCNJ11(ENSG00000187486), PDGFRB(ENSG00000113721), TECTA(ENSG00000109927), MCAM(ENSG00000076706), NEU3(ENSG00000162139), KCNAB1(ENSG00000169282), MAST1(ENSG00000105613), NOS3(ENSG00000164867), SMIM18(ENSG00000253457), CBL(ENSG00000110395), BBS7(ENSG00000138686), KIAA0040(ENSG00000235750), TMEM231(ENSG00000205084), PTGER3(ENSG00000050628), RHBDD2(ENSG00000005486), PANX2(ENSG00000073150), ITPR1(ENSG00000150995), NKAIN4(ENSG00000101198), SRC(ENSG00000197122), SEMA6B(ENSG00000167680), SLC52A3(ENSG00000101276), TMEM184A(ENSG00000164855), SNORC(ENSG00000182600), RIPK4(ENSG00000183421), TMEM242(ENSG00000215712), UPK3A(ENSG00000100373), ERMP1(ENSG00000099219), IL1RAP(ENSG00000196083), CCR2(ENSG00000121807), CAV3(ENSG00000182533), ATP12A(ENSG00000075673), NXPE2(ENSG00000204361), PLCH2(ENSG00000149527), RYR2(ENSG00000198626), FRS3(ENSG00000137218), GPR84(ENSG00000139572), FAM168B(ENSG00000152102), ATP1A3(ENSG00000105409), TMEM251(ENSG00000153485), TMEM40(ENSG00000088726), NMUR2(ENSG00000132911), SYN3(ENSG00000185666), FZD5(ENSG00000163251), STXBP1(ENSG00000136854), PRNP(ENSG00000171867), SELENOK(ENSG00000113811), AQP5(ENSG00000161798), TMEM60(ENSG00000135211), ILK(ENSG00000166333), SLC47A1(ENSG00000142494), RAB17(ENSG00000124839), ENPP1(ENSG00000197594), SH3BP4(ENSG00000130147), SLC19A3(ENSG00000135917), MGAM(ENSG00000257335), PEX11G(ENSG00000104883), RNF144B(ENSG00000137393), SYBU(ENSG00000147642), MYORG(ENSG00000164976), MCOLN1(ENSG00000090674), RNF112(ENSG00000128482), UST(ENSG00000111962), SLC16A14(ENSG00000163053), RAB43(ENSG00000172780), RUFY3(ENSG00000018189), ARHGAP21(ENSG00000107863), TMEM219(ENSG00000149932), VASN(ENSG00000168140), CRK(ENSG00000167193), CSK(ENSG00000103653), AIF1L(ENSG00000126878), BMPR1A(ENSG00000107779), AP4M1(ENSG00000221838), AKR1A1(ENSG00000117448), CYP4X1(ENSG00000186377), KCNMA1(ENSG00000156113), ABCG8(ENSG00000143921), BCL2(ENSG00000171791), AP1S2(ENSG00000182287), ANPEP(ENSG00000166825), BBS1(ENSG00000174483), ASPHD1(ENSG00000174939), PAM(ENSG00000145730), ALOX15B(ENSG00000179593), NIPAL4(ENSG00000172548), HPS6(ENSG00000166189), IL10RB(ENSG00000243646), MXRA7(ENSG00000182534), ANK2(ENSG00000145362), SLC47A1(ENSG00000142494), RAB17(ENSG00000124839), ENPP1(ENSG00000197594), SH3BP4(ENSG00000130147), IL10RB(ENSG00000243646), RNF144B(ENSG00000137393), MXRA7(ENSG00000182534), F2R(ENSG00000181104), MCOLN1(ENSG00000090674), SLC16A14(ENSG00000163053), ARHGAP21(ENSG00000107863), CRK(ENSG00000167193), FFAR2(ENSG00000126262), BMPR1A(ENSG00000107779), ATRAID(ENSG00000138085), ABCG8(ENSG00000143921), ANK2(ENSG00000145362), ASPHD1(ENSG00000174939), PAM(ENSG00000145730), ABCC1(ENSG00000103222), NIPAL4(ENSG00000172548), APLNR(ENSG00000134817), MYORG(ENSG00000164976), UST(ENSG00000111962), RUFY3(ENSG00000018189), TMEM219(ENSG00000149932), AIF1L(ENSG00000126878), CYP4X1(ENSG00000186377), BCL2(ENSG00000171791), BBS1(ENSG00000174483), SLC13A5(ENSG00000141485), APLNR(ENSG00000134817), GPR37(ENSG00000170775), CYP2B6(ENSG00000197408), MADCAM1(ENSG00000099866), F2R(ENSG00000181104), SREBF1(ENSG00000072310), ABCC1(ENSG00000103222), DYSF(ENSG00000135636), TMEM52B(ENSG00000165685), ATP6V1D(ENSG00000100554), ATRAID(ENSG00000138085), CLIC4(ENSG00000169504), ST8SIA2(ENSG00000140557), TNFRSF10C(ENSG00000173535), SLC26A4(ENSG00000091137), FFAR2(ENSG00000126262), GNAZ(ENSG00000128266), ZDHHC2(ENSG00000104219), SLC30A7(ENSG00000162695), SFT2D2(ENSG00000213064), TMEM74B(ENSG00000125895), TNFSF14(ENSG00000125735), TTC17(ENSG00000052841), ACY3(ENSG00000132744), CHST11(ENSG00000171310), FIBCD1(ENSG00000130720), ZGRF1(ENSG00000138658), PIM1(ENSG00000137193), SRI(ENSG00000075142), SLC26A2(ENSG00000155850), TNFRSF11A(ENSG00000141655), AHCYL1(ENSG00000168710), SFXN5(ENSG00000144040), NDUFS8(ENSG00000110717), NTRK3(ENSG00000140538), PARD3(ENSG00000148498), PLPP1(ENSG00000067113), NOXA1(ENSG00000188747), RHOH(ENSG00000168421), PIGR(ENSG00000162896), TPCN1(ENSG00000186815), TULP3(ENSG00000078246), TJP3(ENSG00000105289), TCIRG1(ENSG00000110719), LMAN2(ENSG00000169223), PIGU(ENSG00000101464), RAP1GAP(ENSG00000076864), MFSD10(ENSG00000109736), SEL1L3(ENSG00000091490), SERP1(ENSG00000120742), SCARA3(ENSG00000168077), ITGA9(ENSG00000144668), NECAP1(ENSG00000089818), PLIN2(ENSG00000147872), ABCC3(ENSG00000108846), ABCB1(ENSG00000085563),
GPR183(ENSG00000169508), SLC24A3(ENSG00000185052), MACF1(ENSG00000127603), MGST2(ENSG00000085871), DENND5B(ENSG00000170456), MEGF8(ENSG00000105429), PNKD(ENSG00000127838), SERP2(ENSG00000151778), TNFAIP8L3(ENSG00000183578), SLC3A1(ENSG00000138079), VPS28(ENSG00000160948), ZDHHC8(ENSG00000099904), TMEM128(ENSG00000132406), TMEM64(ENSG00000180694), UBR4(ENSG00000127481), TSPAN31(ENSG00000135452), TNFRSF14(ENSG00000157873), TMEM201(ENSG00000188807), TSC2(ENSG00000103197), MCUR1(ENSG00000050393), SUSD6(ENSG00000100647), SERINC1(ENSG00000111897), RAB31(ENSG00000168461), TRPM4(ENSG00000130529), VTI1B(ENSG00000100568), TNFRSF10A(ENSG00000104689), TMEM164(ENSG00000157600), STK38L(ENSG00000211455), SLC25A23(ENSG00000125648), IMMT(ENSG00000132305), ADCK2(ENSG00000133597), ATG2B(ENSG00000066739), CCR10(ENSG00000184451), CHST3(ENSG00000122863), JAM3(ENSG00000166086), GPC4(ENSG00000076716), CX3CR1(ENSG00000168329), DPY19L4(ENSG00000156162), SLC48A1(ENSG00000211584), CLEC16A(ENSG00000038532), FCER1G(ENSG00000158869), DMXL2(ENSG00000104093), ARL8A(ENSG00000143862), CYSLTR1(ENSG00000173198), B3GNT5(ENSG00000176597), FAR2(ENSG00000064763), TESC(ENSG00000088992), CLN6(ENSG00000128973), CTNND1(ENSG00000198561), FXYD6(ENSG00000137726), ARL8B(ENSG00000134108), ELOVL1(ENSG00000066322), ANKRD13A(ENSG00000076513), CD1E(ENSG00000158488), SLC37A4(ENSG00000137700), HRH1(ENSG00000196639), GJA4(ENSG00000187513), GALNT16(ENSG00000100626), DENND5A(ENSG00000184014), SLC31A1(ENSG00000136868), ALG2(ENSG00000119523), ACKR3(ENSG00000144476), CD63(ENSG00000135404), CLDND1(ENSG00000080822), CYP20A1(ENSG00000119004), B3GNT6(ENSG00000198488), TMEM30B(ENSG00000182107), CMTM8(ENSG00000170293), AGPS(ENSG00000018510), BCL2L13(ENSG00000099968), CASD1(ENSG00000127995), ABCD3(ENSG00000117528), GRB14(ENSG00000115290), MPZL1(ENSG00000197965), NBAS(ENSG00000151779), SLC2A10(ENSG00000197496), APOOL(ENSG00000155008), HIGD1A(ENSG00000181061), MT-ND4(ENSG00000198886), POMGNT1(ENSG00000085998), ICA1(ENSG00000003147), MFSD2A(ENSG00000168389), SLC16A7(ENSG00000118596), PDLIM4(ENSG00000131435), GPR63(ENSG00000112218), CHRM3(ENSG00000133019), RNF144A(ENSG00000151692), PIGS(ENSG00000087111), PTPRB(ENSG00000127329), HLA-DRB1(ENSG00000196126), CLCN5(ENSG00000171365), CTXN2(ENSG00000233932), ABCA8(ENSG00000141338), AP3S1(ENSG00000177879), AP3S2(ENSG00000157823), CACNA1C(ENSG00000151067), CAVIN2(ENSG00000168497), GK(ENSG00000198814), ZDHHC2(ENSG00000104219), SFT2D2(ENSG00000213064), TMEM74B(ENSG00000125895), CHRM3(ENSG00000133019), ACER3(ENSG00000078124), CHST11(ENSG00000171310), SFXN5(ENSG00000144040), PARD3(ENSG00000148498), NOXA1(ENSG00000188747), TULP3(ENSG00000078246), TCIRG1(ENSG00000110719), PIGU(ENSG00000101464), RAP1GAP(ENSG00000076864), MFSD10(ENSG00000109736), SERP1(ENSG00000120742), ITGA9(ENSG00000144668), NECAP1(ENSG00000089818), PLIN2(ENSG00000147872), ABCC3(ENSG00000108846), GPR183(ENSG00000169508), MACF1(ENSG00000127603), MGST2(ENSG00000085871), MERTK(ENSG00000153208), PNKD(ENSG00000127838), SERP2(ENSG00000151778), VPS28(ENSG00000160948), TMEM260(ENSG00000070269), TMEM128(ENSG00000132406), UBR4(ENSG00000127481), TNFRSF14(ENSG00000157873), TSC2(ENSG00000103197), SUSD6(ENSG00000100647), TRPM4(ENSG00000130529), VTI1B(ENSG00000100568), TMEM164(ENSG00000157600), ADCK2(ENSG00000133597), CCR10(ENSG00000184451), CHST3(ENSG00000122863), GPC4(ENSG00000076716), DPY19L4(ENSG00000156162), CLEC16A(ENSG00000038532), DMXL2(ENSG00000104093), ARL8A(ENSG00000143862), CLCN5(ENSG00000171365), CYSLTR1(ENSG00000173198), FAR2(ENSG00000064763), TESC(ENSG00000088992), CTNND1(ENSG00000198561), FXYD6(ENSG00000137726), ARL8B(ENSG00000134108), ELOVL1(ENSG00000066322), ANKRD13A(ENSG00000076513), CTXN2(ENSG00000233932), EDNRB(ENSG00000136160), GJA4(ENSG00000187513), GALNT16(ENSG00000100626), ABCA8(ENSG00000141338), CLDND1(ENSG00000080822), TMEM63B(ENSG00000137216), TMEM30B(ENSG00000182107), COL13A1(ENSG00000197467), AGPS(ENSG00000018510), BCL2L13(ENSG00000099968), ABCD3(ENSG00000117528), MPZL1(ENSG00000197965), NBAS(ENSG00000151779), SLC2A10(ENSG00000197496), APOOL(ENSG00000155008), HIGD1A(ENSG00000181061), POMGNT1(ENSG00000085998), SLC2A11(ENSG00000133460),MFSD2A(ENSG00000168389), SLC30A7(ENSG00000162695), FIBCD1(ENSG00000130720), TNFRSF11A(ENSG00000141655), PDGFC(ENSG00000145431), PIGS(ENSG00000087111), RHOH(ENSG00000168421), TPCN1(ENSG00000186815), TJP3(ENSG00000105289), SEL1L3(ENSG00000091490), SCARA3(ENSG00000168077), DENND5B(ENSG00000170456), TMEM64(ENSG00000180694), TSPAN31(ENSG00000135452), TMEM201(ENSG00000188807), MCUR1(ENSG00000050393), SERINC1(ENSG00000111897), RAB31(ENSG00000168461), TNFRSF10A(ENSG00000104689), B3GNT5(ENSG00000176597), GLMP(ENSG00000198715), SLC37A4(ENSG00000137700), HRH1(ENSG00000196639), SLC31A1(ENSG00000136868), AP3S1(ENSG00000177879), AP3S2(ENSG00000157823), CMTM8(ENSG00000170293), CACNA1C(ENSG00000151067), CAVIN2(ENSG00000168497), MPP2(ENSG00000108852), HAS3(ENSG00000103044), MT-ND4(ENSG00000198886), PDLIM4(ENSG00000131435), GPR63(ENSG00000112218), RDX(ENSG00000137710), MERTK(ENSG00000153208), TMEM260(ENSG00000070269), EVA1A(ENSG00000115363), CDH2(ENSG00000170558), TMEM63B(ENSG00000137216), CYTH2(ENSG00000105443), SLC2A11(ENSG00000133460), ACER3(ENSG00000078124), PDGFC(ENSG00000145431), HAS3(ENSG00000103044), NAV3(ENSG00000067798), PDE9A(ENSG00000160191), UCHL1(ENSG00000154277), PLCD4(ENSG00000115556), TMPRSS2(ENSG00000184012), EDNRB(ENSG00000136160), COL13A1(ENSG00000197467), MPP2(ENSG00000108852), KCNK5(ENSG00000164626), GLMP(ENSG00000198715), ARFGAP3(ENSG00000242247), ENO2(ENSG00000111674), TMEM263(ENSG00000151135), SEMA5A(ENSG00000112902), SLC26A1(ENSG00000145217), ITGB1(ENSG00000150093), ADIPOR2(ENSG00000006831), UPK3BL2(ENSG00000284981), UPK3BL1(ENSG00000267368), SLC39A2(ENSG00000165794), EFHD1(ENSG00000115468), ABCG1(ENSG00000160179), ADGRA3(ENSG00000152990), GJA1(ENSG00000152661), ANKFY1(ENSG00000185722), BIK(ENSG00000100290), COL6A2(ENSG00000142173), VIPR2(ENSG00000106018), TRPV4(ENSG00000111199), TMEM43(ENSG00000170876), TMEM255B(ENSG00000184497), CAVIN1(ENSG00000177469), CDH11(ENSG00000140937), FCAR(ENSG00000186431), CAV1(ENSG00000105974), ANXA1(ENSG00000135046), VIPR2(ENSG00000106018), TRPV4(ENSG00000111199), TMEM263(ENSG00000151135), SEMA5A(ENSG00000112902), SLC26A1(ENSG00000145217), TMEM43(ENSG00000170876), ADIPOR2(ENSG00000006831), TMEM255B(ENSG00000184497), SLC39A2(ENSG00000165794), CLCA2(ENSG00000137975), ABCG1(ENSG00000160179), CAVIN1(ENSG00000177469), CDH11(ENSG00000140937), ADGRA3(ENSG00000152990), GJA1(ENSG00000152661), ANKFY1(ENSG00000185722), CAV1(ENSG00000105974), BIK(ENSG00000100290), ANXA1(ENSG00000135046), ZDHHC6(ENSG00000023041), ABHD17C(ENSG00000136379), GAA(ENSG00000171298), ZDHHC6(ENSG00000023041), KCNJ1(ENSG00000151704), ABHD17C(ENSG00000136379), CFC1(ENSG00000136698), SLC25A33(ENSG00000171612), RNF215(ENSG00000099999), MAST2(ENSG00000086015), XKR9(ENSG00000221947), VSTM5(ENSG00000214376), RNF103(ENSG00000239305), C2CD2L(ENSG00000172375), IGSF8(ENSG00000162729), PHKA1(ENSG00000067177),DOCK8(ENSG00000107099),IFFO1(ENSG00000010295),MARCKS(ENSG00000277443), SLC6A14(ENSG00000268104), RNF215(ENSG00000099999), MAST2(ENSG00000086015), VSTM5(ENSG00000214376), C2CD2L(ENSG00000172375), IGSF8(ENSG00000162729), PHKA1(ENSG00000067177), MARCKS(ENSG00000277443), SLC2A1(ENSG00000117394), SLC6A14(ENSG00000268104), SLC25A33(ENSG00000171612), XKR9(ENSG00000221947), HLA-
DPA1(ENSG00000231389), IFFO1(ENSG00000010295), AKAP12(ENSG00000131016), PPP1R3A(ENSG00000154415), TMEM245(ENSG00000106771), TEX2(ENSG00000136478), SCD5(ENSG00000145284), TSPAN33(ENSG00000158457), RRAD(ENSG00000166592), SNX1(ENSG00000028528), SMPD2(ENSG00000135587), NDUFAF5(ENSG00000101247), GNAI3(ENSG00000065135), MSRA(ENSG00000175806), MRC2(ENSG00000011028), MFN2(ENSG00000116688), UTRN(ENSG00000152818), ARHGEF12(ENSG00000196914), GNAI1(ENSG00000127955), HTR7(ENSG00000148680), FGFRL1(ENSG00000127418), GABARAPL1(ENSG00000139112), FMNL3(ENSG00000161791), DAG1(ENSG00000173402), CLN5(ENSG00000102805), ANO9(ENSG00000185101), DAPP1(ENSG00000070190), CLEC2B(ENSG00000110852), ICAM1(ENSG00000090339), TMEM245(ENSG00000106771), RTN3(ENSG00000133318), SNX1(ENSG00000028528), SMPD2(ENSG00000135587), GNAI3(ENSG00000065135), MRC2(ENSG00000011028), UTRN(ENSG00000152818), ARHGEF12(ENSG00000196914), GNAIl(ENSG00000127955), FGFRL1(ENSG00000127418), FMNL3(ENSG00000161791), DAG1(ENSG00000173402), CLN5(ENSG00000102805), ANO9(ENSG00000185101), DAPP1(ENSG00000070190), LRIG1(ENSG00000144749), ARMCX2(ENSG00000184867), TEX2(ENSG00000136478), SCD5(ENSG00000145284), TSPAN33(ENSG00000158457), NDUFAF5(ENSG00000101247), MFN2(ENSG00000116688), CLEC2B(ENSG00000110852), LRIG1(ENSG00000144749), ARMCX2(ENSG00000184867), LRRC24(ENSG00000254402), RTN3(ENSG00000133318), GPRIN1(ENSG00000169258), TMED6(ENSG00000157315), SCN4B(ENSG00000177098), DST(ENSG00000151914), CCND1(ENSG00000110092), SLC22A16(ENSG00000004809), SLC38A9(ENSG00000177058), SPIRE1(ENSG00000134278), SIRPB1(ENSG00000101307), PAG1(ENSG00000076641), PVR(ENSG00000073008), SLC25A36(ENSG00000114120), PCDHB15(ENSG00000113248), SNX7(ENSG00000162627), SLC11A1(ENSG00000018280), MPC2(ENSG00000143158), MGLL(ENSG00000074416), ITPR2(ENSG00000123104), MFSD11(ENSG00000092931), RINT1(ENSG00000135249), TMEM86A(ENSG00000151117), SLC38A5(ENSG00000017483), SUSD1(ENSG00000106868), REEP4(ENSG00000168476), GREB1(ENSG00000196208), KCNMB3(ENSG00000171121), DAB2(ENSG00000153071), HHAT(ENSG00000054392), CDK14(ENSG00000058091), APOBR(ENSG00000184730), ADCK5(ENSG00000173137), ACVRL1(ENSG00000139567), TMEM37(ENSG00000171227), ATP8B1(ENSG00000081923), ATG9A(ENSG00000198925), NFASC(ENSG00000163531), LFNG(ENSG00000106003), MRAP(ENSG00000170262), NDUFB9(ENSG00000147684), VAT1(ENSG00000108828), TTYH3(ENSG00000136295), TMED6(ENSG00000157315), SCN4B(ENSG00000177098), DST(ENSG00000151914), CCND1(ENSG00000110092), SPIRE1(ENSG00000134278), SIRPB1(ENSG00000101307), VAT1(ENSG00000108828), PCDHB15(ENSG00000113248), SNX7(ENSG00000162627), SLC11A1(ENSG00000018280), MGLL(ENSG00000074416), ITPR2(ENSG00000123104), TMEM86A(ENSG00000151117), SLC38A5(ENSG00000017483), REEP4(ENSG00000168476), GABBR1(ENSG00000204681), DAB2(ENSG00000153071), CDK14(ENSG00000058091), CLTCL1(ENSG00000070371), APOBR(ENSG00000184730), ADCK5(ENSG00000173137), ATP8B1(ENSG00000081923), NFASC(ENSG00000163531), LFNG(ENSG00000106003), NDUFB9(ENSG00000147684), SLC22A16(ENSG00000004809), SLC38A9(ENSG00000177058), MPC2(ENSG00000143158), RINT1(ENSG00000135249), GREB1(ENSG00000196208), KCNMB3(ENSG00000171121), MRAP(ENSG00000170262), KCNJ16(ENSG00000153822), NPHS1(ENSG00000161270), GABBR1(ENSG00000204681), CLTCL1(ENSG00000070371), ST8SIA5(ENSG00000101638), FXYD7(ENSG00000221946), FKBP11(ENSG00000134285), TSPAN12(ENSG00000106025), TBC1D9B(ENSG00000197226), TSPAN3(ENSG00000140391), SNX4(ENSG00000114520), SMAGP(ENSG00000170545), C2CD2(ENSG00000157617), PLPP2(ENSG00000141934), TREM2(ENSG00000095970), SEZ6L2(ENSG00000174938), TMEM94(ENSG00000177728), RHOA(ENSG00000067560), SMIM1(ENSG00000235169), PLXNA1(ENSG00000114554), SLC25A46(ENSG00000164209), RNF5(ENSG00000204308), MIEF2(ENSG00000177427), SRD5A3(ENSG00000128039), NAGPA(ENSG00000103174), NBEA(ENSG00000172915), TFPI(ENSG00000003436), RAB20(ENSG00000139832), RASD2(ENSG00000100302), RNF139(ENSG00000170881), SPCS3(ENSG00000129128), MGAT1(ENSG00000131446), KCNK1(ENSG00000135750), POMT2(ENSG00000009830), HEG1(ENSG00000173706), ILDR1(ENSG00000145103), LYPLA1(ENSG00000120992), TMEM159(ENSG00000011638), NUCB2(ENSG00000070081), PRIMA1(ENSG00000175785), VPS11(ENSG00000160695), SIGIRR(ENSG00000185187), VAMP1(ENSG00000139190), TMEM53(ENSG00000126106), SLC19A2(ENSG00000117479), SRPRB(ENSG00000144867), TECPR1(ENSG00000205356), SLC35E1(ENSG00000127526), VPS41(ENSG00000006715), FKTN(ENSG00000106692), KIFC3(ENSG00000140859), CYP2S1(ENSG00000167600), FAM171A1(ENSG00000148468), GCNT3(ENSG00000140297), B4GALT4(ENSG00000121578), CACNA1B(ENSG00000148408), DOK7(ENSG00000175920), ENTPD7(ENSG00000198018), EMC10(ENSG00000161671), FZD2(ENSG00000180340), HLA-DQB1(ENSG00000179344), CLMN(ENSG00000165959), COQ2(ENSG00000173085), CDIPT(ENSG00000103502), C6orf89(ENSG00000198663), CERS4(ENSG00000090661), DGAT1(ENSG00000185000), LIME1(ENSG00000203896), MALRD1(ENSG00000204740), ENTPD1(ENSG00000138185), CYP26B1(ENSG00000003137), FIBP(ENSG00000172500), ERBIN(ENSG00000112851), CHPF2(ENSG00000033100), SLC25A13(ENSG00000004864), CPM(ENSG00000135678), ATL2(ENSG00000119787), CLCA4(ENSG00000016602), COG8(EENNSSGG0000000000221732368107), ANKRD46(ENSG00000186106), ATRN(ENSG00000088812), ADGRL1(ENSG00000072071), BBS5(ENSG00000163093), CDH26(ENSG00000124215), UGT8(ENSG00000174607), PDZD3(ENSG00000172367), KCNA5(ENSG00000130037), GLCE(ENSG00000138604), SLC16A9(ENSG00000165449), KCNK10(ENSG00000100433), NOD2(ENSG00000167207), SLC16A4(ENSG00000168679), ITSN1(ENSG00000205726), LRP1(ENSG00000123384), CAPN2(ENSG00000162909), SMAGP(ENSG00000170545), C2CD2(ENSG00000157617), PLPP2(ENSG00000141934), PLXNA1(ENSG00000114554), RNF5(ENSG00000204308), MIEF2(ENSG00000177427), SRD5A3(ENSG00000128039), TFPI(ENSG00000003436), RNF139(ENSG00000170881), SPCS3(ENSG00000129128), MGAT1(ENSG00000131446), KCNK1(ENSG00000135750), HEG1(ENSG00000173706), VPS11(ENSG00000160695), VAMP1(ENSG00000139190), SLC19A2(ENSG00000117479), VPS41(ENSG00000006715), COX14(ENSG00000178449), C6orf89(ENSG00000198663), CERS4(ENSG00000090661), DGAT1(ENSG00000185000), MALRD1(ENSG00000204740), FIBP(ENSG00000172500), SLC25A13(ENSG00000004864), COG8(EENNSSGG0000000000221732368107), ADGRL1(ENSG00000072071), BBS5(ENSG00000163093), SLC16A9(ENSG00000165449), NOD2(ENSG00000167207), SLC16A4(ENSG00000168679), TSPAN12(ENSG00000106025), TBC1D9B(ENSG00000197226), SNX4(ENSG00000114520), NAGPA(ENSG00000103174), SUSD4(ENSG00000143502), NUCB2(ENSG00000070081), PRIMA1(ENSG00000175785), SIGIRR(ENSG00000185187), TMEM53(ENSG00000126106), TECPR1(ENSG00000205356), KIFC3(ENSG00000140859), FAM171A1(ENSG00000148468), B4GALT4(ENSG00000121578), CACNA1B(ENSG00000148408), DOK7(ENSG00000175920), EMC10(ENSG00000161671), FZD2(ENSG00000180340), SLC2A5(ENSG00000142583), ERBIN(ENSG00000112851), CHPF2(ENSG00000033100), ATL2(ENSG00000119787), ATRN(ENSG00000088812), KCNA5(ENSG00000130037), GLCE(ENSG00000138604), VDAC3(ENSG00000078668), MAGI2(ENSG00000187391), SNX19(ENSG00000120451), COX14(ENSG00000178449), SUSD4(ENSG00000143502), ATP6V1B1(ENSG00000116039), TRPV5(ENSG00000127412), SLC2A5(ENSG00000142583), NLGN1(ENSG00000169760), CCR4(ENSG00000183813), TMEM135(ENSG00000166575), STBD1(ENSG00000118804), PPP1R16B(ENSG00000101445), SDR16C5(ENSG00000170786), RDH13(ENSG00000160439), RAB28(ENSG00000157869), PRKN(ENSG00000185345), PLPPR2(ENSG00000105520), TMEM106C(ENSG00000134291), VAMP5(ENSG00000168899), TOMM40L(ENSG00000158882),
TMX2(ENSG00000213593), TSNARE1(ENSG00000171045), GRAP(ENSG00000154016), FAM162A(ENSG00000114023), AFG1L(ENSG00000135537), COMTD1(ENSG00000165644), PYCARD(ENSG00000103490), MAPK8IP1(ENSG00000121653), PCDH10(ENSG00000138650), CAV2(ENSG00000105971), MAP1LC3B(ENSG00000140941), TMEM135(ENSG00000166575), PPP1R16B(ENSG00000101445), SDR16C5(ENSG00000170786), RDH13(ENSG00000160439), RAB28(ENSG00000157869), VAMP5(ENSG00000168899), TMX2(ENSG00000213593), TSNARE1(ENSG00000171045), GRAP(ENSG00000154016), AFG1L(ENSG00000135537), CAV2(ENSG00000105971), COMTD1(ENSG00000165644), MAP1LC3B(ENSG00000140941), PLPPR2(ENSG00000105520), FAM162A(ENSG00000114023), PYCARD(ENSG00000103490), MAPK8IP1(ENSG00000121653), RMDN2(ENSG00000115841), PCDHB5(ENSG00000113209), PLOD1(ENSG00000083444), NUP54(ENSG00000138750), SLC22A1(ENSG00000175003), SDCBP2(ENSG00000125775), FGFR2(ENSG00000066468), GBA2(ENSG00000070610), GPR34(ENSG00000171659), C1orf210(ENSG00000253313), EPB41L2(ENSG00000079819), LBR(ENSG00000143815), DGKG(ENSG00000058866), MMP2(ENSG00000087245), PCDHB5(ENSG00000113209), SLC22A1(ENSG00000175003), SDCBP2(ENSG00000125775), FGFR2(ENSG00000066468), GBA2(ENSG00000070610), GPR34(ENSG00000171659), C1orf210(ENSG00000253313), RMDN2(ENSG00000115841), RETSAT(ENSG00000042445), NUP54(ENSG00000138750), GSG1L(ENSG00000169181), EPB41L2(ENSG00000079819), RETSAT(ENSG00000042445), ZC3H12A(ENSG00000163874), IKBIP(ENSG00000166130), GSG1L(ENSG00000169181)

### List of All Proteins in the List Above Separately Categorized by Applicable Use

[0283] (Ensembl version 92.38 ID for the symbols below can be found in the table above):
[0284] 1. Cancer treated: melanoma
   [0285] a. Tissue protected: Colon TTYH3, AXL, VPS52, MS4A8, MAP1LC3A, CD36, FCAMR, MGAT4C, SCGN, SLC9A2, TM4SF18, SNTG2, PCSK5, ALPL, SELENBP1, STX1A, SNX24, SMIM24, SMURF1, NAAA, SLC27A2, SEC13, SLC41A2, SOCS7, QRFPR, RPH3AL, MPP7, RAC1, RNF145, SERINC3, ARHGAP5, NFAM1, HCRTR1, LDLR, GPR65, RAC3, MUC12, WSCD1, HTRA1, RAB27B, KLRG1, PARVB, DLC1, PLCB3, PCDHA4, RECK, MUC1, PSTPIP2, RAB3B, PSCA, KCNH8, SDC1, TMEM45A, TPSG1, TRPM7, SLC18A1, SPPL3, STYK1, TMEM134, MAPKAP1, IFI27, ITLN1, PTGDR, SGMS1, SYNGR4, ITGB6, MUC15, PEX10, OSBPL7, CD46, PROM2, PLPP7, MGAT4A, LRRN2, OBSCN, PROM1, UGT2B4, TMEM72, TMEM132A, VSIG10, SYT11, TMEM236, SLC7A7, TMEM143, VPS35L, ZP2, SYTL4, SYTL3, TMEM41A, TSPAN8, UNC13B, PLAUR, SYTL2, PRRG2, TPRA1, SLC46A2, OCLN, RNF170, SPHK1, SLC28A3, SCAMP5, PTAFR, SYP, PIGZ, PTPRN2, RSAD2, SLC39A14, SLC6A12, SLC6A15, RAB25, SLC20A2, SLC39A10, TGFBR1, STK16, TRAF4, SIGLEC14, MTG2, SPTLC3, SEC11C, MARK2, SCN7A, SLC15A3, PNLDC1, ARHGAP27, RNF186, TSPAN15, TRAF3IP3, VTCN1, TAS2R38, TCTN3, UBL3, TMEM39B, SLC30A10, CA2, CDHR5, CLDN4, ARL4D, ACVR1B, GGT1, DPEP1, GSDMB, GPBAR1, GHR, KCNJ8, SYK, FPR1, ADCY10, ACSL5, CD177, CLCA1, GLP2R, CADM4, DSC2, GNB5, ADGRF1, RASGRP2, CLDN5, EPHA4, HCAR3, DSG2, AQP8, CNTFR, CEACAM5, CHST6, CA4, DEPDC5, EPCAM, GNG11, LPAR6, CTDNEP1, CPTP, HSD17B2, MAGI1, ENTPD8, FPGS, MAN1C1, FADS3, CXCR1, FADS2, FER1L6, ANKRD13B, BEST2, BRI3, CDC42EP5, CLDN8, GAL3ST2, HTR4, B3GNT8, ELOVL7, B3GALT5, CDHR2, CLDN7, CLN3, CRB3, ACE2, SH3BP5, ATP9A, CNTNAP3, CDH17, C3AR1, ATP11C, KCNIP3, ATP1A2, CIB1, ADGRG6, ASIC5, CEACAM6, DCXR, AKAP10, ARL4C, ANO1, ANXA13, CHST14, ARHGEF4, ABHD12, C12orf66, CNPPD1, BLNK, ALG14, CEACAM3, HTR2B, B3GAT1, CASQ1, HHLA2, MAOA, CYP2C9, DIP2A, FGFR4, IBTK, SLC9A3R2, NCEH1, LRFN5, MYZAP, LHFPL2, KCNN3, MS4A18, MC4R, MS4A12, MCUB, EPPK1, MSTO1, SLC2A6, KIAA2013, NIPAL1, SLC16A10, IL17RA, ITGB4, LY9, LYN, GPA33, ALOX12, MUC13, OR10R2, MRC1, NECA P2, KLRC3, HCAR2, PRKCA, PSKH1, NDST2,
   [0286] b. Tissue protected: Lung TGM2, AXL, VSIG4, SLC30A4, VPS52, EFNB3, CD300C, SLC22A15, SELENBP1, ST6GAL1, SCEL, SMURF1, RNF145, SERINC3, NFAM1, AGER, PLLP, SLC18A2, RECK, MUC1, REEP2, MGAT4B, SCTR, ITGB6, OSBPL7, CD46, EHD2, OBSCN, PPL, CD84, TMEM80, PRRG2, OCLN, RNF170, RHOG, RSAD2, SLC6A15, RAB25, SLC39A10, TM4SF1, STEAP1, SCN7A, PNLDC1, TSPAN15, UBL3, CA2, CLDN4, ACVR1B, EHD1, GJB4, GPBAR1, KCNJ8, FPR1, CD247, CCR7, CYB5A, ACSL5, GNB5, CLDN5, EPHA4, DSG2, HCLS1, CEACAM5, AIFM2, LPAR6, CXCR1, FADS2, ANKRD13B, AIG1, APBB1IP, CLDN8, CLDN7, AQP4, CYB561D1, C3AR1, C ACNA2D2, ACE, CEACAM6, AQP3, CHST14, CADM1, HTR2B, CXCR3, MAOA, IBTK, NCEH1, LAMP3, MC4R, EHD3, MSTO1, NSMF, SLC34A2, PSKH1, LRRK2,
   [0287] c. Tissue protected: Skin TTYH3, SUN3, VPS52, CLEC10A, CD300C, CD47, MGAT4C, PERP, SNTG2, ALPL, TMPRSS11D, SLC6A1, SCEL, SMURF1, SEC13, SLC41A2, TMEM97, MPP7, RAC1, RNF145, ARHGAP5, NFAM1, SLC26A9, RAC3, RAB27B, MTMR2, MUC1, REEP2, KCNH8, GPIHBP1, SDC1, LTBR, TMEM45A, MGAT4B, TYROBP, STYK1, TMEM134, SLC10A6, MAPKAP1, IFI27, SGMS1, MUC15, OLFM2, PROM2, PLPP7, KRT1, PLA2G4E, LRRN2, DMPK, OBSCN, PPL, TMEM79, SLC7A7, YRDC, ZP2, SYTL3, TACSTD2, PRRG2, MSLN, OCLN, SPHK1, SLC28A3, S1PR5, PTAFR, RAB25, SLC20A2, SLC39A10, STK16, SLC19A1, MARK2, PNLDC1, TRAF3IP3, TAS2R38, TMEM39B, CLDN4, CYBA, GJB4, KCNJ8, SYK, FA2H, FPR1, DSP, ADCY10, CDH6, CD177, GLP2R, ANO7, FYN, DSC2, GPX8, CLDN5, EPHA4, HCAR3, DSG2, GPR39, CD248, CAPNS2, HCN1, DSC3, GSDMA, FGFBP1, CTDNEP1, FADS3, FADS2, B3GNT4, DSG1, ADGRF4, BRI3, ELOVL7, MS4A1, ASPRV1, CIB1, ASIC5, DSG3, DCXR, AQP3, CLEC2A, CNPPD1, BLNK, MAOA, IBTK, MYZAP, MC4R, MCUB, EPPK1, FGFR3, MSTO1, NIPAL1, ITGB4, ALOX12, OR10R2, HCAR2, PSKH1, SLC30A4, MS4A8, PI4KB, ULBP3, GPR65, RHBG, PLLP, DLC1, PLN, OSBPL7, CD46, ICAM3, SLC25A15, TMEM80, TMEM143, UNC13B, RHCG, TPRA1, SNTB1, SH2D3C, RNF170, RHO G, RSAD2, S100A8, RAB11FIP5, TM4SF1, TRAF4, MTG2, SEMA5B, ARHGAP27, TSPAN15, VTCN1, TCTN3, EHD1, GSDMC, CYB5A, EVI2A, FCGR2B, CNTFR, CEACAM5, GPAT2, CHST6, DNER, FGD2, CPTP, CXCR1, FNBP1, B3GNT8, BASP1, ATP9A, CYB561D1, CDH13, AKAP10, ANO1, CHST14, AP4E1, ALG14, HTR2B, NCEH1, LHFPL2, MUC21, EHD3, IL17RA, NECAP2, ,
   [0288] d. Tissue protected: Liver TTYH3, AXL, VPS52, UPK1B, MAP1LC3A, CLEC10A, CD300C, CREB3L3, FCAMR, TM4SF18, PCSK5, PI4KB, ALPL, SELENBP1, SLC6A4, SNX24, ST6GAL1, NAAA, SLC25A40, SLC27A2, SLCO1B3, SLC41A2, SLCO1B1, SLC25A43, SLC27A5, SERINC3, NFAM1, LDLR, GPR65, SLC18A2, RAB27B, MTMR2, PTGDR2, RECK, PDZK1, RDH16, LIN7A, SDC1, TMEM45A, MGAT4B, SPPL3, MAPKAP1, SGMS1, SYNGR4, PRRT2, CD46, OLFM2, NAT8, PNPLA3, LRRN2, SLC25A15, OBSCN, UGT2B4, TMEM132A, YIPF1, TFR2, VPS35L, UGT1A6, SYTL4, TNS2, UNC13B, ST7L, OCLN, RNF170, SPHK1, PTAFR, RSAD2, SLC39A14, SLC6A12, RAB25, TGFBR1, SLCO2B1, MARK2, TEX261, TSPAN15, TSPAN2, SLC30A10, CA2, CDHR5, ACVR1B, GGT1, GSDMB, GHR, KCNJ8, GLRB, CYP2D6, CYB5A, ACSL5, CD177, FYN, GAS2, CADM4, DSC2, SLC2A2, RASGRP2, CYP2A7, EPHA4, HCAR3, DSG2, FOLH1, CYP1A2, CNTFR, CYP3A4, CEACAM5, CYP4V2, DEPDC5, NINJ1, CYP2C8, DHCR24, CTDNEP1, HSD17B2, MAL2, ENTPD8, MAN1C1, CYP2C19, FADS3, FADS2, AQP9, AIG1, BRI3, CDHR2, CRB3, ASGR1, CYB561D1, ADRA2B, ABCB11, ATP1A2, CMKLR1, ASIC5, ACAD11, DCXR, ANO1, BACE2, CD320, ASGR2, PIK3AP1, CYP3A43, B3GAT1, CASQ1, INTS2, MAOA, CYP2C9, FGFR4, IBTK, MOXD1, SLC9A3R2, MYZAP, LHFPL2, MFAP3L, KCND1, MSTO1, GPR15, SLC2A6, NIPAL1, IL17RA, ITGB4, SLC2A8, ALOX12, OR10R2, ABCC2, HCAR2, DPP4, PSKH1, LRRK2, NDST2, NPC1L1,
   [0289] e. Tissue protected: Kidney (glomeruli) AXL, ZDHHC16, CD47, MGAT4C, SLC9A2, TM4SF18, SLC22A15, SLC45A1, SMURF1, RAC1, RNF145, PODXL, NFAM1, RAC3, PARVB, RECK, TPSG1, PECAM1, SCUBE1, PTGDR, SGMS1, PLA2R1, CD46, PROM2, PNPLA3, MGAT4A, MAP6, EHD2, MPP5, NPHS2, VPS35L, TSPAN7, TNS2, PRRG2, TPRA1, PTAFR, RSAD2, SLC6A12, THSD7A, PITPNM3, PTPRO, SCN7A, TSPAN15, ARL4D, EHD1, HYAL2, CDH6, FYN, GAS2, CD93, FAM107A, GNB5, ADGRF1, CD34, RASGRP2, CLDN5, EVI2A, DSG2, ENG, CD248, DOCK5, CR1, FGD2, FADS3, FADS2, FNBP1, B3GALT5, CLN3, CRB3, ACKR1, CDH13, B3GAT1, MAOA, SLC9A3R2, EHD3, MSTO1, DPP4, PSKH1,
   [0290] f. Tissue protected: Kidney (tubules) TTYH3, AXL, SUN3, TRPM3, VPS52, TBC1D3G, TREH, MS4A8, FCAMR, MGAT4C, SLC9A2, THY1, TM4SF18, SLC22A15, SELPLG, TMEM240, PCSK5, PI4KB, ALPL, SELENBP1, SLC6A4, SMIM24, SLC5A12, ST6GAL1, SLC12A1, SMURF1, NAAA, SLC25A40, SLC27A2, SLC4A10, SLC41A2, QRFPR, RPH3AL, SLC6A19, SLC22A11, S1PR2, MPP7, SERINC3, ARHGAP5, SLC28A2, NFAM1, HCRTR1, RDH11, LDLR, GPR65, AGER, RHBG, PLLP, WSCD1, VHL, HTRA1, RAB27B, PARVB, DLC1, PLCB3, PCDHA4, PDE2A, RECK, MUC1, RALB, PDZK1, PSCA, KCNH8, LIN7A, SDC1, LTBR, TMEM45A, MGAT4B, TRPM7, TMEM132E, SPPL3, STYK1, TMEM134, SCTR, MAPKAP1, IFI27, PTGDR, SGMS1, ITGB6, MUC15, NOS1, PEX10, PRRT2, OSBPL7, CD46, OLFM2, PROM2, NAT8, PNPLA3, PLPP7, MGAT4A, LRRN2, NTRK2, EHD2, MPP5, SLC25A15, OBSCN, PPL, PROM1, RFTN2, UGT2B4, SLC22A6, TMEM72, UGT3A1, TMEM132A, VSIG10, YIPF1, ATP6V0A4, SLC7A7, TMEM80, VPS35L, ZP2, UGT1A6, SYTL4, TMEM252, SYTL3, TMEM174, TMEM41A, TSPAN8, UNC13B, PLAUR, RHCG, SYTL2, PRRG2, TPRA1, FASLG, SLC46A2, SLC28A1, SNTB1, SIRT2, SLC22A2, SH2D3C, OCLN, RNF170, SPHK1, RHOG, SLC28A3, SCAMP5, PTAFR, SLC22A8, PIGZ, RSAD2, SLC39A14, SLC6A12, RAB25, RAB11FIP5, SLC20A2, SLC6A18, SLC13A2, TGFBR1, TMEM213, SLC5A1, STK16, TRAF4, SIGLEC14, SYT7, MTG2, SPTLC3, SLC4A4, SEC11C, MARK2, TMEM178B, TEX261, PKHD1, SLC35G2, PNLDC1, TSPAN2, VTCN1, TAS2R38, TSPAN16, UBL3, TMEM39B, CA2, CDHR5, CLDN4, ARL4D, ENPP6, EMC4, ACVR1B, GGT1, IYD, DPEP1, ENPP3, CUBN, EHD1, GSDMB, DLK1, GPBAR1, GHR, HYAL2, KCNJ8, GLRB, GSDMC, SYK, KIRREL2, CPNE6, CYB5A, JAKMIP1, CLTRN, ADCY10, ACSL5, CDH6, CD177, CPT1C, GAS2, CADM4, FAM107A, SLC2A2, GNB5, CLCNKB, ADGRG5, CALCR, CLDN5, CLCNKA, EPHA4, EVI2A, FAM169A, HCAR3, DSG2, GPR39, CASR, FOLH1, CNTFR, CD248, CHST6, CA4, CYP4V2, DEPDC5, EPCAM, GNG11, GLIPR1L2, LPXN, KIAA0319, DHCR24, LPAR6, CTDNEP1, LRFN4, CPTP, MAL2, MAGI1, FPGS, MAN1C1, FADS3, CXCR1, FADS2, AQP6, DSG1, AIG1, BRI3, CDC42EP5, CLDN8, NPR3, HTR4, CDC42SE1, CDHR2, CLDN7, CRB3, ADAM28, SH3BP5, ATP9A, SLC7A9, CLDN10, DUSP15, ATP11C, FXYD2, ACE, CMKLR1, CLDN2, CIB1, ASIC5, DCXR, AKAP10, ARL4C, ANO5, ANO1, ANXA13, AQP3, CHST14, ARHGEF4, AP4E1, C12orf66, BLNK, PIK3AP1, CYP3A43, CDH16, CADM1, HTR2B, B3GAT1, CASQ1, INTS2, MAOA, DIP2A, FGFR4, IBTK, LRFN2, MOXD1, NCEH1, MYZAP, LHFPL2, KCNJ10, KCNJ12, MFAP3L, MC4R, KCND1, MCUB, EHD3, EPPK1, MSTO1, MS4A4A, SLC2A6, KIAA2013, NIPAL1, SLC16A 10, IL17RA, FMO1, LRP2, ALOX12, IL23R, OR10R2, MRC1, GRIN2D, NECAP2, NSMF, ABCC2, MDGA2, HCAR2, KCTD8, PRKCA, DPP4, PSKH1, LRRK2, NDST2, NPC1L1,
   [0291] g. Tissue protected: Heart (cardiomyocytes) TGM2, TTYH3, AXL, SLC30A4, SLC27A6, SPAG4, UCP3, EFNB3, CD300C, CD36, CD47, MGAT4C, RASL10B, SLC22A15, PCSK5, PI4KB, SNX24, NAAA, SLC4A10, SEC13, SLC41A2, RAC1, RNF145, SERINC3, NFAM1, LDLR, RAC3, WSCD1, HTRA1, PARVB, POPDC2, RECK, PLN, GPIHBP1, INPP5D, MGAT4B, SGCG, SRL, MAPKAP1, SGMS1, ITGB6, PRRT2, OSBPL7, CD46, OLFM2, ART3, PLPP7, KLHL41, MGAT4A, LRRN2, DMPK, EHD2, SLC25A15, OBSCN, RFTN2, TMEM132A, YIPF1, TMEM236, SLC7A7, YRDC, TMEM143, TREML1, VPS35L, ZP2, TMEM41A, PRRG2, TPRA1, SNTB1, SIRT2, SH2D3C, RNF170, SPHK1, SCAMP5, PTAFR, RAB11FIP4, PIGZ, RSAD2, SLC39A14, SLC6A12, RYR1, SLAMF8, SLC20A2, SLC39A10, TM4SF1, TGFBR1, SLCO2B1, STK16, TRAF4, MTG2, MARK2, T MEM178B, SEMA5B, TEX261, SCN7A, SLC35G2, SLC15A3, TSPAN15, VTCN1, TAS2R38, TCTN3, UBL3, TMEM39B, EHD1, GSDMB, MMP27, FPR1, DSP, CDH6, CDH15, ADRA1A, CADM4, DSC2, GPX8, GNB5, ADGRF1, RASGRP2, CAVIN4, EPHA4, HCAR3, DSG2, GPR39, FCGR2B, CHRNA1, CNTFR, CD248, GPAT2, CHST6, FGD2, CYP4V2, DEPDC5, CTDNEP1, CPTP, LEPROTL1, MAN1C1, FADS3, CXCR1, FADS2, ANKRD13B, B3GNT4, AIG1, B3GNT8, ELOVL7, CDC42SE1, CDHR2, CLN3, ADAM28, CNTNAP3, CSF3R, C3AR1, ATP11C, ATP1A2, CMKLR1, CDH13, CIB1, ADGRG6, ADRB1, ASIC5, ACAD11, DCXR, AKAP10, ARL4C, ANO5, ANO1, ARHGEF4, AP4E1, BACE2, CNPPD1, BLNK, CASQ1, MAOA, IBTK, JPH1, NCEH1, MYZAP, LHFPL2, MFAP3L, GPR182, MC4R, KCND1, MCUB, EHD3, MSTO1, GPR15, SLC16A10, ITGB4, SLC2A8, ALOX12, OR10R2, MCEMP1, HCAR2, PRKCA, DES, PSKH1, LRRK2, NDST2,
   [0292] h. Tissue protected: Thyroid SLC30A4, SLC27A6, VPS52, CD47, SLC9A2, TMEM100, TM4SF18, SLC22A15, PCSK5, PI4KB, ALPL, SELENBP1, SLITRK4, SLC5A5, SNX24, ST6GAL1, SMURF1, NAAA, SEC13, QRFPR, MPP7, RNF145, SERINC3, ARHGAP5, NFAM1, KCNQ5, TPO, GPR65, WSCD1, VHL, GPIHBP1, LIN7A, INPP5D, MAPKAP1, IFI27, SGMS1, MUC15, OSBPL7, CD46, OLFM2, PSD3, PROM2, PLPP7, MGAT4A, LRRN2, NTRK2, SLC25A15, OBSCN, PPL, PROM1, PORCN, YIPF1, SLC7A7, YRDC, TMEM80, VPS35L, SYTL4, SYTL3, TMEM41A, UNC13B, PRRG2, TPRA1, FASLG, OCLN, RNF170, SPHK1, PTAFR, RSAD2, SLC39A14, RAB25, SLC20A2, SLC39A10, SLCO2B1, STK16, TRAF4, MTG2, MARK2, TEX261, PNLDC1, TSPAN15, VTCN1, TCTN3, UBL3, TMEM39B, C19orf18, CLDN4, ACVR1B, IYD, DUOX1, EHD1, GHR, KCNJ8, SYK, ADCY10, CDH6, FYN, CADM4, DSC2, GPX8, GNB5, CLCNKB, EPHX4, RASGRP2, CLDN5, CLCNKA, EPHA4, FCRL1, HCAR3, DSG2, FCGR2B, CNTFR, GPAT2, FGD2, HCN1, IPCEF1, DEPDC5, EPCAM, LPXN, LPAR6, CTDNEP1, MAGI1, CXCR1, FADS2, FER1L6, ANKRD13B, FNBP1, ADD2, CLDN8, CLDN7, CRB3, BASP1, AAK1, ATP9A, AQP4, C3AR1, CMKLR1, CRHR1, CIB1, DCXR, AKAP10, ARL4C, CHST14, ARHGEF4, AP4E1, CD320, C12orf66, BLNK, CDH16, CDH10, CEACAM3, CADM1, INTS2, MAOA, IBTK, NCEH1, MYZAP, LHFPL2, LRP1B, MC4R, EPPK1, MSTO1, GPR15, SLC2A6, IL17RA, ITGB4, LYN, OR10R2, GRIN2D, NECAP2, HCAR2, PRKCA, PSKH1, NDST2,
   [0293] i. Tissue protected: Pancreatic endocrine cells (Islets) SLC30A4, VPS52, MAP1LC3A, CD47, SCGN, PI4KB, ALPL, STX1A, NAAA, RAB3A, SEC13, RTN1, QRFPR, RPH3AL, RNF145, SCG3, ARHGAP5, NFAM1, HCRTR1, POMGNT2, WSCD1, VHL, PTGDR2, RAB3B, SPPL3, MAPKAP1, SGMS1, ITGB6, PTPRN, CD46, OLFM2, MGAT4A, LRRN2, OBSCN, NECAB2, SLC17A6, SV2A, YRDC, SYTL4, TSPAN7, TNS2, UNC13B, PLAUR, SLC30A8, PRRG2, TPRA1, FASLG, RNF170, SCAMP5, SYP, PTPRN2, RSAD2, RAB25, SLCO2B1, STK16, SIGLEC14, SYT7, TEX261, MAPK10, SLC35G2, TSPAN2, TMEM39B, EMC4, DLK1, DGCR2, CLTRN, ADCY10, CDH6, GNB5, GNAO1, CLDN5, FAM169A, DSG2, CASR, AQP8, CNTFR, CYP4V2, EPCAM, LPAR6, CTDNEP1, MAGI1, CXCR1, FADS2, CLDN7, ATP9A, CLU, C3AR1, FXYD2, AMPH, ATP1A2, CRHR1, ASIC5, ARL4C, ARHGEF4, CADM1, GAD2, ALOX5, MAOA, FGFR4, IBTK, MC4R, KCND1, MSTO1, KIAA2013, FMO1, OR10R2, MDGA2, PRKCA, DPP4, PSKH1,
   [0294] j. Tissue protected: Pancreatic exocrine cells AXL, VPS52, CLEC10A, CD300C, RASL10B, TBC1D3D, TMEM100, TM4SF18, SELPLG, PCSK5, PI4KB, ALPL, ST6GAL1, SMURF1, NAAA, SLC27A2, SLC4A10, SEC13, SLC41A2, RPH3AL, TMEM97, RNF145, SEC16B, NFAM1, POMGNT2, PLLP, WSCD1, VHL, RAB27B, PCDHA4, MUC1, PSCA, KCNH8, SDC1, TMEM132E, STYK1, SCTR, SCUBE1, IFI27, SGMS1, ITGB6, MUC15, CD46, OLFM2, PROM2, PLPP7, MGAT4A, LRRN2, OBSCN, PPL, PROM1, TMEM72, UGT3A1, VSIG10, YRDC, TMEM80, SYTL4, UNC13D, TRAT1, TMEM41A, TSPAN8, UNC13B, PLAUR, TBC1D3E, SYTL2, TACSTD2, TPRA1, FASLG, SNTB1, OCLN, RNF170, SPHK1, SYCN, SLC28A3, SCAMP5, RSAD2, SLC39A14, RAB25, RAB11FIP5, SLC20A2, SLC39A10, TM4SF1, SLCO2B1, STK16, TRAF4, SYT7, MTG2, SPTLC3, SLC4A4, SEC11C, SLC19A1, MARK2, TMEM178B, PKHD1, SCN7A, PNLDC1, ARHGAP27, TSPAN15, TRAF3IP3, TAS2R38, TCTN3, TMEM39B, CA2, CLDN4, ARL4D, ACVR1B, GGT1, DPEP1, CUZD1, GHR, KCNJ8, GLRB, GP2, SYK, KIRREL2, FA2H, CYB5A, DSP, ADCY10, ACSL5, CDH6, CYSTM1, DSC2, ADGRF1, RASGRP2, CLDN5, EVI2A, DSG2, FCGR2B, AQP8, CNTFR, CD248, GPAT2, CHST6, FGD2, CA4, CYP4V2, EPCAM, LPAR6, CTDNEP1, MAGI1, FPGS, LEPROTL1, MAN1C1, FADS3, FADS2, BRI3, CLDN8, HTR4, CDH9, ELOVL7, CDC42SE1, CLDN7, CLN3, CRB3, ADAM28, ACE2, CNTNAP3, CFTR, CLDN10, ATP11C, FXYD2, CMKLR1, CIB1, CHST4, AKAP10, ARL4C, CHST14, AP4E1, C12orf66, PIK3AP1, ALG14, CADM1, HTR2B, CASQ1, MAOA, AQP12A, AQP12B, FGFR4, IBTK, MOXD1, NCEH1, LRFN5, MYZAP, MC4R, MCUB, EPPK1, MSTO1, SLC2A6, KIAA2013, SLC16A10, IL17RA, LYN, OR10R2, PRKCA, PSKH1, LRRK2, NDST2,
[0295] 2. Cancer treated: lung cancer
   [0296] a. Tissue protected: Colon AXL, TMEM158, UGT2A3, MS4A8, MAP1LC3A, CACNB2, CORO7, ABCD4, CD36, FCAMR, GABARAPL2, MGAT4C, SCGN, TM4SF18, UBE2J1, SNTG2, SYT13, PCSK5, PLSCR4, STX1A, SMIM24, SPCS1, TNFSF12, NAAA, SLC27A2, HCRTR1, BVES, P2RX6, PLEKHA3, MUC12, TVP23B, WHAMM, PTPRD, KLRG1, DLC1, MED28, PLCB3, RECK, PTPRT, RAB3B, PSCA, KCNH8, MRGPRF, TMEM45A, TPSG1, TRPM7, SLC18A1, SPATA9, SLCO4A1, STYK1, SLC9A3, ITLN1, PTGDR, ADCYAP1R1, SYNGR4, PEX10, MRGPRX2, PCDH11X, PALM, PLPP7, VEPH1, PRKAR2B, CNEP1R1, SORD, GOLGA2, OBSCN, AATK, SPRED1, UGT2B4, SLC26A3, TMEM72, TMEM132A, UGT2B17, VSIG10, SYT11, SLC7A7, SERAC1, TVP23C, UGT2B28, ZP2, VAC14, QTRT1, TSPAN13, TMEM253, TBCD, UGT2B15, ARHGAP17, SEZ6, C2orf88, GOPC, SPHK1, SCAMP5, PTPRN2, SLC39A14, SLC6A12, SNX6, PHACTR2, RAB29, NAPG, SEC11C, PHLPP2, PRRT3, SLC35B1, NAPB, TRAF3IP3, TMEM154, TMEM171, TCTN3, TMEM39B, TMEM30A, CA2, GGT1, DPEP1, CLSTN1, FCER1A, IL9R, SLC2A12, CLCA1, GLP2R, CEACAM1, FPR2, CADM4, FKBP2, GRK5, CHDH, GNB5, FAM126B, HTR1A, GLT8D2, ENOX2, GATM, FLNC, GCHFR, AADAC, AQP8, DIAPH1, ADGRE1, CHODL, CA12, CA4, DPP10, DGKQ, GBP2, LRRC37B, CPTP, HSD17B2, MAGI1, ENTPD8, MAN1C1, AP3M1, FADS3, ABHD16A, ANKRD27, CXCR1, ANO8, AQP1, BEST2, BRI3, CDC42EP5, MPP1, GAL3ST2, CDC42EP1, UGCG, ELOVL7, CDHR2, CLN3, ACE2, SH3BP5, CNTNAP3, ENPEP, CLDN11, KCNIP3, ARRB1, CADPS, C5AR2, ARRDC1, ADGRG6, ASIC5, AKAP10, ANXA13, AP1S3, EPB41L3, ABHD12, ADGRV1, CNPPD1, EBP, BLNK, HSD3B7, ALG14, B3GAT1, CASQ1, CYP2C9, DIP2A, IBTK, ABCC5, SMPD4, HMOX1, LRFN5, SLC16A6, MYZAP, LHFPL2, NDUFS1, MS4A12, GFRA2, MCUB, GNG12, GLRA2, MAP2K1, SLC2A6, KIAA2013, NIPA2, NIPAL1, IGFLR1, ITGB4, GAL3ST1, DPY19L1, RPS6KC1, ALOX12, OR10R2, MRC1, KLRC3, PRKCA, PSKH1,
   [0297] b. Tissue protected: Lung AXL, VSIG4, SLC30A4, EFNB3, CACNB2, CD300C, TRIM13, UBE2J1, PLSCR4, SLC25A17, TGFBR3, SEMA4F, NUS1, BVES, AGER, TVP23B, SLC18A2, WHAMM, MED28, RECK, PTPRT, REEP2, PTPRG, SGIP1, MRGPRX2, PALM, VEPH1, KIRREL3, EHD2, OBSCN, CD84, SERAC1, TVP23C, QTRT1, TBC1D3, P2RY2, SEZ6, GOPC, RHOG, PSD4, PHACTR2, NAPG, RYK, PHLPP2, SIGLEC9, CA2, EHD1, GJB4, EHD4, CD247, CCR7, SLC44A2, AOC3, FKBP2, GRK5, GNB5, GLT8D2, AADAC, GBP2, AIFM2, FES, L1CAM, AP3M1, ANKRD27, CXCR1, AQP1, APBB1IP, CDC42EP1, ELMO2, ENPEP, CACNA2D2, ACE, ARRB1, BSN, BDKRB2, CXCR3, IBTK, EHD3, NIPA2, LDLRAD2, PI4KA, PSKH1, LRRK2,
   [0298] c. Tissue protected: Skin SUN3, CACNB2, CLEC10A, CD300C, ABCD4, GABARAPL2, MGAT4C, SOX10, SNTG2, SLC25A17, TGFBR3, SPCS1, TNFSF12, SLC6A1, TMEM97, NEGR1, NUS1, REEP2, KCNH8, GPIHBP1, TMEM45A, TYROBP, STYK1, SLC9A3, LANCL2, PALM, PLPP7, LAX1, VEPH1, SORD, DMPK, GOLGA2, OBSCN, AATK, TRPM2, RMC1, SLC7A7, SERAC1, YRDC, ZP2, VAC14, TBCD, UGT2B15, P2RY2, ARHGAP17, C2orf88, GOPC, SPHK1, PHACTR2, RAB29, RYK, SLC19A1, PRRT3, NAPB, SIGLEC9, TRAF3IP3, TMEM171, TMEM39B, TMEM30A, CYBA, GJB4, DSP, GLP2R, ANO7, CACNA2D1, FYN, FPR2, GPX8, FKBP2, GRK5, FAM126B, GLT8D2, ENOX2, GATM, AADAC, CD99, CD248, CAPNS2, CA12, HCN1, MALL, DGKQ, GBP2, GSDMA, LRRC37B, L1CAM, AP3M1, FADS3, ANKRD27, B3GNT4, BRI3, CDC42EP1, ELOVL7, CD81, BST1, ARRB1, CD1D, ASPRV1, ASIC5, DSG3, ADGRV1, CNPPD1, BLNK, HSD3B7, IBTK, ABCC5, MYZAP, MCUB, GNG12, MAP2K1, NIPA2, NIPAL1, ITGB4, LDLRAD2, RPS6KC1, ALOX12, CHL1, PI4KA, OR10R2, NCS1, PSKH1, TCTN2, SLC30A4, MS4A8, CORO7, TRIM13, UBE2J1, SYT13, PI4KB, ULBP3, TYR, WIPI2, DLC1, MPP6, PLN, PTPRT, SLCO4A1, KCNQ4, SGIP1, PRKAR2B, SLC25A15, SPRED1, QTRT1, TSPAN13, TBC1D3, DCT, ZC4H2, RHOG, RAB11FIP5, NAPG, PMEL, SEMA5B, PHLPP2, TCTN3, DTL, CNTN3, CLSTN1, EHD1, FCER1A, EHD4, ADCY7, EVI2A, TM7SF2, CYB561A3, FCGR2B, DIAPH1, FAM210A, ADGRE1, GPAT2, CD82, DNER, CPTP, CXCR1, PROCR, FNBP1, UGCG, ELMO2, CDH13, AKAP10, CPNE2, BDKRB2, ALG14, ADGRA1, LHFPL2, MUC21, NDUFS1, GFRA2, EHD3, ,
   [0299] d. Tissue protected: Liver VNN1, AXL, MAP1LC3A, CACNB2, CLEC10A, CD300C, CREB3L3, FCAMR, G ABARAPL2, TRIM13, TM4SF18, UBE2J1, SYT13, PCSK5, SLC25A17, PI4KB, SVEP1, SPCS1, NAAA, SLC27A2, SLCO1B3, SLCO1B1, SEMA4F, SLC27A5, NEGR1, PLEKHA3, SLC18A2, PTPRD, KSR2, PTGDR2, RECK, PTPRT, LIN7A, TMEM45A, KCNQ4, SYNGR4, PRRT2, MRGPRX2, NAT8, PNPLA3, VEPH1, KIRREL3, SORD, GOLGA2, MME, SLC25A15, OBSCN, AATK, SPRED1, UGT2B4, TMEM132A, YIPF1, TFR2, SERAC1, TNS2, TBCD, ZDHHC13, UGT2B15, ARHGAP17, SLC25A25, ST7L, C2orf88, GOPC, SPHK1, SLC39A14, SLC6A12, SLCO2B1, RAB29, NAPG, TEX261, NAPB, SIGLEC9, TMEM171, TMEM30A, CA2, GGT1, FCER1A, GLRB, CYP2D6, CACNA2D1, CEACAM1, FYN, FPR2, GAS2, CADM4, SLC2A2, CHDH, HTR1A, CREB3L2, CYP2A7, GLT8D2, HEPACAM, GATM, FOLH1, CYP1A2, GCHFR, AADAC, CYP3A4, DIAPH1, FAM210A, FMO3, MALL, GBP2, ABCB4, NINJ1, CYP2C8, LRRC37B, FES, KMO, HSD17B2, ENTPD8, MAN1C1, AP3M1, CYP2C19, FADS3, ANKRD27, BCL2L10, AQP9, BRI3, UGCG, CDHR2, ENPEP, ASGR1, ARRB1, ABCB11, CMKLR1, CTSL, ARRDC1, ASIC5, HSD11B1, ADGRV1, CD320, EBP, ASGR2, PIK3AP1, CYP3A43, HSD3B7, B3GAT1, CASQ1, INTS2, CYP2C9, IBTK, SMPD4, SLC16A6, MYZAP, LHFPL2, MFAP3L, LIMS2, NDUFS1, GPR15, SLC2A6, NIPAL1, IGFLR1, ITGB4, LDLRAD2, DPY19L1, SLC2A8, RPS6KC1, ALOX12, PI4KA, OR10R2, ABCC2, PSKH1, LRRK2, SLC10A1, NPC1L1,
   [0300] e. Tissue protected: Kidney (glomeruli) AXL, ZDHHC16, ZAP70, CACNB2, CORO7, MGAT4C, TM4SF18, UBE2J1, KDR, MAPT, SYT13, SLC25A17, TGFBR3, TNFSF12, SLC45A1, PODXL, KIRREL1, P2RX6, PLEKHA3, TVP23B, WHAMM, KSR2, RECK, PTPRT, PTPRG, MRGPRF, SLC34A1, TPSG1, PECAM1, SCUBE1, PTGDR, ADCYAP1R1, PLA2R1, PTH2R, PNPLA3, PALM, VEPH1, KIRREL3, PRKAR2B, EHD2, GOLGA2, MPP5, MME, NKD1, NPHS2, RMC1, SERAC1, TVP23C, VAC14, TSPAN7, TTC7B, TNS2, ARHGAP17, C2orf88, STK10, GOPC, SNCA, PSD4, SLC6A12, SNX6, PHACTR2, THSD7A, PEAR1, NAPG, RYK, PITPNM3, SLC35B1, RTL1, NAPB, TMEM171, CLSTN1, EHD1, HYAL2, EHD4, CEACAM1, FYN, GAS2, CD93, FAM107A, GNB5, CD34, FAM126B, HTR1A, GLT8D2, EVI2A, ENG, CD99, CD248, FAM210A, ADGRE1, CR1, GBP2, MAS1, ADGRL4, FADS3, ANKRD27, ANO8,AQP1, FNBP1, CDC42EP1, CLN3, ELMO2, ENPEP, ARRB1, CHRM1, BSN, CDH13, B3GAT1, SLC43A2, LIMS2, ITGA8, EHD3, GNG12, MLIP, NIPA2, LDLRAD2, PI4KA, PSKH1, PDGFRA,
   [0301] f. Tissue protected: Kidney (tubules) VNN1, AXL, SUN3, TRPM3, TBC1D3G, TREH, MS4A8, CACNB2, CORO7, ABCD4, FCAMR, GABARAPL2, MGAT4C, THY1, TM4SF18, UBE2J1, SELPLG, MAPT, TMEM240, PCSK5, PI4KB, SVEP1, SMIM24, SLC5A12, SLC5A2, SPCS1, TNFSF12, STIMATE, SLC12A1, TLN2, NAAA, PCDHB2, SLC27A2, SCNN1D, SLC6A19, SEMA4F, S1PR2, SLC34A3, SLC28A2, HCRTR1, RDH11, NEGR1, PTH1R, KIRREL1, P2RX6, AGER, TVP23B, WIPI2, WHAMM, PTPRD, DLC1, PLCB3, MPP6, PDE2A, RECK, PTPRT, RALB, PSCA, KCNH8, LIN7A, MRGPRF, TMEM45A, SLC34A1, TRPM7, PRICKLE1, SLCO4A1, STYK1, KCNQ4, SLC9A3, PTGDR, ADCYAP1R1, SGIP1, NOS1, PEX10, PRRT2, NAT8, PNPLA3, PALM, PLPP7, VEPH1, KIRREL3, CNEP1R1, NTRK2, SORD, EHD2, GOLGA2, MPP5, MME, SLC25A15, OBSCN, AATK, RFTN2, SPRED1, UGT2B4, SLC22A6, TMEM72, TRPM2, UGT3A1, XPNPEP2, TMEM132A, VSIG10, YIPF1, ATP6V0A4, SLC7A7, SERAC1, TVP23C, ZP2, VAC14, QTRT1, TMEM252, TSPAN13, TMEM174, TTC7B, TBC1D3, TBCD, ZDHHC13, ARHGAP17, SLC28A1, SIRT2, SLC22A2, C2orf88, GOPC, SPHK1, RHOG, SCAMP5, SLC22A8, SLC13A3, SLC39A14, SLC6A12, SNX6, PHACTR2, RAB11FIP5, SLC6A18, SLC13A2, TMEM213, SLC5A1, SYT7, RAB29, PEAR1, SLC4A4, NAPG, RYK, SEC11C, TEX261, PKHD1, PRRT3, SLC35G2, OPRD1, NAPB, TMEM171, TSPAN16, TMEM39B, TMEM30A, CA2, ENPP6, EMC4, GGT1, IYD, DPEP1, ENPP3, CUBN, CLSTN2, CLSTN1, EHD1, FCER1A, HYAL2, GLRB, KIRREL2, EHD4, CKMT2, CLTRN, SLC44A2, ADCY7, FAM151A, CPT1C, GAS2, CADM4, FAM107A, FNDC5, FKBP2, GRK5, SLC2A2, CHDH, DOCK2, GNB5, CLCNKB, FAM126B, HTR1A, ADGRG5, CLCNKA, CREB3L2, GLT8D2, ENOX2, EVI2A, FAM169A, TM7SF2, GATM, CASR, FOLH1, GCHFR, CD248, DIAPH1, FAM210A, ADGRE1, FRRS1L, CA12, CA4, FMO3, GLIPR1L2, LPXN, DGKQ, GBP2, KIAA0319, LRRC37B, FES, KMO, LRFN4, CPTP, L1CAM, MAGI1, MAN1C1, AP3M1, EPHB1, FADS3, ABHD16A, ANKRD27, BSND, BCL2L10, CXCR1, ANO8,AQP6, AQP1, BRI3, CDC42EP5, NPR3, MPP1, UGCG, CDHR2, SH3BP5, BST1, ENPEP, SLC7A9, FXYD2, ACE, ARRB1, CATIP, CMKLR1, BSN, C5AR2, CPT1B, COX7B, CTSL, ARRDC1, ASIC5, AKAP10, ANXA13, CPNE2, AP1S3, EPB41L3, ADGRV1, EBP, BLNK, PIK3AP1, C5AR1, CYP3A43, HSD3B7, CDH16, B3GAT1, CASQ1, INTS2, DIP2A, IBTK, ABCC5, SMPD4, HMOX1, LRFN2, SLC43A2, SLC16A6, MYZAP, LHFPL2, KCNJ10, KCNJ12, MFAP3L, NDUFS1, GFRA2, MCUB, EHD3, GNG12, MLIP, MAP2K1, SLC2A6, KIAA2013, NIPA2, NIPAL1, IGFLR1, FAM234B, FMO1, GAL3ST1, LDLRAD2, DPY19L1, RPS6KC1, LRP2, ALOX12, MFSD1, CHL1, PI4KA, IL23R, OR10R2, MRC1, GRIN2D, ABCC2, KCTD8, PRKCA, PSKH1, LRRK2, NPC1L1,
   [0302] g. Tissue protected: Heart (cardiomyocytes) AXL, TCTN2, SLC30A4, EFNB3, CAP2, CACNB2, CD300C, CD36, GABARAPL2, MGAT4C, RASL10B, MAPT, SYT13, PCSK5, SLC25A17, TGFBR3, PI4KB, SVEP1, SPCS1, TNFSF12, TLN2, NAAA, SGCB, NEGR1, NUS1, BVES, P2RX6, PLEKHA3, TVP23B, WHAMM, PTPRD, POPDC2, MPP6, P2RY6, RECK, PLN, GPIHBP1, MRGPRF, SHISA4, INPP5D, FLT1, SPATA9, SGCG, SLCO4A1, SRL, KCNQ4, SLC9A3, SGIP1, PRRT2, LANCL2, ART3, PLPP7, VEPH1, CNEP1R1, DMPK, EHD2, GOLGA2, SLC25A15, OBSCN, AATK, RFTN2, SPRED1, SIPA1, TMEM132A, YIPF1, SLC7A7, SERAC1, YRDC, TVP23C, TREML1, ZP2, VAC14, QTRT1, TSPAN13, TTC7B, TBC1D3, TBCD, ZDHHC13, ZC4H2, ARHGAP17, SLC25A25, SIRT2, C2orf88, GOPC, SPHK1, SCAMP5, RAB11FIP4, SLC39A14, SLC6A12, RYR1, SLAMF8, SNX6, PHACTR2, SLCO2B1, RAB29, PEAR1, NAPG, SEMA5B, TEX261, SLC35B1, SLC35G2, NAPB, TMEM171, TCTN3, TMEM39B, TMEM30A, CNTN3, EHD1, FCER1A, MMP27, EHD4, CKMT2, DSP, ADCY7, CACNA2D1, CDH15, ADRA1A, CADM4, GPX8, FNDC5, GRK5, CHDH, GNB5, FAM126B, HTR1A, CAVIN4, CREB3L2, SLC2A4, GLT8D2, TM7SF2, HHATL, CYB561A3, FCGR2B, FLNC, CHRNA1, CD248, GPAT2, MALL, DGKQ, GBP2, CAMK2B, LRRC37B, FES, MBOAT7, CPTP, L1CAM, LEPROTL1, MAN1C1, ADGRL4, AP3M1, FADS3, ABHD16A, ANKRD27, CXCR1, FCGRT, ANO8, B3GNT4, UGCG, DMD, ELOVL7, CD81, CDHR2, CLN3, CNTNAP3, BST1, CSF3R, CMKLR1, BSN, CADPS, CPT1B, COX7B, CDH13, CD1D, ARRDC1, AKAP6, ADGRG6, ADRB1, ASIC5, AKAP10, CPNE2, AP1S3, CNPPD1, BLNK, HSD3B7, CASQ1, IBTK, JPH1, ABCC5, SMPD4, SLC16A6, MYZAP, LHFPL2, MFAP3L, NCAM1, GPR182, LIMS2, NDUFS1, MCUB, EHD3, GPR15, MLIP, MAP2K1, IGFLR1, ITGB4, GAL3ST1, LDLRAD2, DPY19L1, SLC2A8, IL18RAP, RPS6KC1, ALOX12, PI4KA, OR10R2, MCEMP1, PRKCA, DES, PSKH1, LRRK2,
   [0303] h. Tissue protected: Thyroid TMEM158, TCTN2, SLC30A4, CACNB2, GABARAPL2, TMEM100, TRIM13, TM4SF18, UBE2J1, VPS33B, SYT13, PCSK5, PLSCR4, SLC25A17, TGFBR3, PI4KB, SVEP1, SLITRK4, SPCS1, TNFSF12, TLN2, NAAA, PCDHB2, SCNN1D, SEMA4F, NEGR1, NUS1, BVES, PLEKHA3, TVP23B, WIPI2, WHAMM, MED28, MPP6, GPIHBP1, LIN7A, INPP5D, PRICKLE1, SLCO4A1, KCNQ4, LANCL2, PSD3, PALM, PLPP7, VEPH1, CNEP1R1, NTRK2, SORD, GOLGA2, SLC25A15, OBSCN, AATK, SPRED1, TRPM2, YIPF1, SLC7A7, SERAC1, YRDC, TVP23C, VAC14, QTRT1, TSPAN13, TTC7B, TBC1D3, TBCD, ZC4H2, ARHGAP17, RTP5, SLC25A25, GOPC, SPHK1, SLC39A14, PHACTR2, RNFT2, SLCO2B1, RAB29, NAPG, RYK, TEX261, PRRT3, SIGLEC9, TMEM171, TCTN3, TMEM39B, C19orf18, TMEM30A, IYD, CNTN3, DUOX1, CLSTN1, EHD1, FCER1A, EHD4, FYN, FPR2, CADM4, GPX8, FKBP2, GNB5, CLCNKB, FAM126B, HTR1A, CLCNKA, CREB3L2, GLT8D2, GATM, FCGR2B, AADAC, CD99, DIAPH1, FAM210A, ADGRE1, GPAT2, HCN1, FMO3, DPP10, MALL, LPXN, DGKQ, CAMK2B, FES, MAGI1, ADGRL4, AP3M1, EPHB1, ANKRD27, CXCR1, ANO8,PROCR, FNBP1, CDC42EP1, UGCG, ELMO2, AAK1, ENPEP, ARRB1, CMKLR1, CRHR1, ARRDC1, AKAP10, CPNE2, AP1S3, ADGRV1, CD320, BLNK, C5AR1, HSD3B7, CDH16, INTS2, AP3B2, IBTK, SMPD4, MTNR1B, MYZAP, LHFPL2, NCAM1, NDUFS1, GFRA2, GNG12, GPR15, MAP2K1, SLC2A6, NIPA2, IGFLR1, ITGB4, FAM234B, GAL3ST1, MFSD1, PI4KA, OR10R2, GRIN2D, NCS1, PRKCA, PSKH1,
   [0304] i. Tissue protected: Pancreatic endocrine cells (Islets) SLC30A4, MAP1LC3A, CACNB2, ABCD4, SCGN, UBE2J1, MAPT, SYT13, PLSCR4, SLC25A17, TGFBR3, PI4KB, SVEP1, STX1A, NAAA, RAB3A, SCG3, HCRTR1, NEGR1, POMGNT2, TVP23B, WIPI2, MPP6, PTGDR2, PTPRT, RAB3B, PRICKLE1, KCNQ4, PTPRN, LANCL2, PTH2R, VEPH1, KIRREL3, PRKAR2B, CNEP1R1, GOLGA2, OBSCN, AATK, NECAB2, SLC17A6, SPRED1, TRPM2, SHISAL2B, SERAC1, YRDC, TVP23C, VAC14, TSPAN7, TSPAN13, TTC7B, TNS2, TBC1D3, ZDHHC13, SLC30A8, SLC25A25, STK10, GOPC, SCAMP5, PTPRN2, PHACTR2, SLCO2B1, SYT7, RAB29, NAPG, TEX261, MAPK10, PRRT3, SLC35G2, OPRD1, NAPB, SIGLEC9, TMEM39B, EMC4, DGCR2, CLTRN, FKBP2, GRK5, GNB5, CREB3L2, GLT8D2, FAM169A, FBXO2, CASR, AQP8, CD99, DIAPH1, CD82, DGKQ, GBP2, MAGI1, CXCR1, CDC42EP1, UGCG, CD81, ELMO2, CLU, FXYD2, ARRB1, AMPH, CADPS, CRHR1, CD1D, ARRDC1, ASIC5, AP1S3, EPB41L3, ADGRV1, GAD2, ALOX5, IBTK, ABCC5, SMPD4, SLC16A6, GFRA2, MAP2K1, KIAA2013, IGFLR1, FMO1, GAL3ST1, LDLRAD2, PI4KA, OR10R2, PRKCA, PSKH1,
   [0305] j. Tissue protected: Pancreatic exocrine cells AXL, TCTN2, CLEC10A, CD300C, CORO7, GABARAPL2, RASL10B, TBC1D3D, TMEM100, TM4SF18, UBE2J1, SELPLG, SYT13, PCSK5, PLSCR4, PI4KB, SVEP1, SPCS1, TNFSF12, STIMATE, NAAA, SLC27A2, TMEM97, SEC16B, POMGNT2, PLEKHA3, TVP23B, WHAMM, MED28, MPP6, PTPRT, PSCA, KCNH8, MRGPRF, SPATA9, SLCO4A1, STYK1, SCUBE1, MRGPRX2, PTH2R, NEURL1, PALM, PLPP7, VEPH1, PRKAR2B, CNEP1R1, SORD, GOLGA2, OBSCN, AATK, SPRED1, TMEM72, TRPM2, UGT3A1, VSIG10, SERAC1, YRDC, TVP23C, VAC14, TSPAN13, UNC13D, TTC7B, TBC1D3, TBC1D3E, ZDHHC13, ZC4H2, ARHGAP17, C2orf88, GOPC, SPHK1, SYCN, SCAMP5, SLC39A14, PHACTR2, RAB11FIP5, SLCO2B1, SYT7, RAB29, SLC4A4, NAPG, RYK, SEC11C, SLC19A1, PKHD1, NAPB, TRAF3IP3, TCTN3, TMEM39B, CA2, DTL, GGT1, DPEP1, CLSTN1, CUZD1, GLRB, SLC2A12, KIRREL2, DSP, ADCY7, CYSTM1, FPR2, FKBP2, GRK5, CHDH, CREB3L2, GLT8D2, EVI2A, FBXO2, GATM, FCGR2B, GCHFR, AADAC, AQP8, CD248, DIAPH1, FAM210A, GPAT2, CA12, CA4, FMO3, MALL, DGKQ, GBP2, LRRC37B, FES, MAGI1, LEPROTL1, MAN1C1, AP3M1, FADS3, ANKRD27, AQP1, BRI3, CDC42EP1, CDH9, ELOVL7, CD81, CLN3, ACE2, CNTNAP3, CFTR, FXYD2, ARRB1, CMKLR1, BSN, CADPS, CTSL, ARRDC1, CHST4, AKAP10, AP1S3, ADGRV1, PIK3AP1, HSD3B7, ALG14, CASQ1, AQP12A, AQP12B, IBTK, SMPD4, LRFN5, MYZAP, NCAM1, NDUFS1, GFRA2, MCUB, GNG12, MAP2K1, SLC2A6, KIAA2013, NIPA2, IGFLR1, FAM234B, GAL3ST1, RPS6KC1, OR10R2, PRKCA, PSKH1, LRRK2,
[0306] 3. Cancer treated: renal cancer
   [0307] a. Tissue protected: Colon TRDN, TJAP1, UGT2A3, TMEM138, TECR, TMEM237, TMCC1, SLC7A6, MS4A8, MAP1LC3A, ATP8B2, CD36, MGAT4C, SLC46A1, ST3GAL6, SLC14A1, TMEM106B, UBE2J1, SNTG2, PCSK5, STX1A, RHOV, LPCAT2, SMIM24, SLC5A6, SUSD3, SLC6A6, PITPNM1, SEC13, SLC41A2, SOCS7, PEX1, PEMT, QRFPR, RPH3AL, NPDC1, NTRK1, RALGPS2, GOLGA8B, GRIK2, MPP7, RAC1, SERINC3, PCDHGA10, RHOF, HRAS, PLA2G4F, PILRA, RAC3, PKHD1L1, RGS16, MUC12, USP8, VPS26B, YIF1B, WHAMM, PTPRD, KLRG1, PARVB, PLCB3, PCDHA4, RHBDL2, SLC25A20, PTPRT, PSTPIP2, RAB3B, PLA2G2A, PSCA, KRAS, MRGPRF, TMEM45A, STXBP6, TPSG1, TRPM7, SLC18A1, NRAS, STYK1, TMEM134, SLC9A3, IFI27, ITLN1, TENM3, SYNGR4, STXBP3, TAOK2, MITD1, MUC15, PRSS8, PEX10, GNPNAT1, MRGPRX2, OSBPL7, CD46, LRRC55, PROM2, NUTF2, PALM, PLPP7, KCNQ1, SLC8A1, NAALADL2, SORD, NECTIN1, OBSCN, LDLRAD3, NALCN, SLC51B, SLC26A3, SLC43A3, SELENOT, SLC9A1, ST7, SNTA1, SCARF1, TMEM132A, UGT2B17, VSIG10, SYT11, TMEM236, SLC7A7, TUB, TEX264, TM4SF20, TMEM143, TMEM119, VPS35L, UGT2B28, ZP2, ZNRF1, QTRT1, TMEM69, TMEM253, TMEM41A, TSPAN8, PLAUR, ZFYVE9, UGT2B15, SLC35A3, SEZ6, GOPC, PCDH1, RNF125, TMTC4, QPCTL, SLC28A3, SLC45A4, SCAMP5, RAB27A, SYP, SLC12A6, SORT1, PARD3B, PIGZ, PTPRN2, SNX6, SMIM6, PHACTR2, MIA3, STK17B, SIGLEC14, SSTR1, TMEM204, PPM1L, SNX18, SLC23A1, SEC11C, SH3KBP1, PIK3R5, PHLPP2, RHOU, SLC4A5, SLC15A3, MSMO1, ARHGAP27, NAPB, RNF186, TRAF3IP3, TMEM154, TMIGD2, TYRO3, TAS2R38, TCTN3, TRPC6, UBL3, ZBED3, SLC30A10, CA2, PRKCZ, ACVR1B, DPEP1, EMC9, FAM83B, GSDMB, GPBAR1, FKRP, FMO5, EMC6, SLC2A12, SYK, KCTD3, FPR1, ARHGEF1, GOLPH3, ATP2C2, ABCG2, GPC5, CD177, CLCA1, GLP2R, CEACAM1, DCBLD1, EPHB3, CYP4F12, CYP4F3, ADGRF1, FAM126B, RASGRP2, CAPRIN2, EPHA4, DGKE, ENOX2, GCSAM, CALN1, CYP4F11, GBF1, DMTN, GOLGA8A, AQP8, ATP11B, ADGRE1, CEACAM5, WDPCP, CHODL, CNR1, ARFGEF3, CARMIL2, CA4, CHMP5, DEPDC5, KPNA2, FAM241B, GDAP1, GNG11, GPR82, IGSF11, IL17RC, LRRC37B, EVA1B, CPT P, HSD17B2, SLC7A8, MAGI1, FPGS, LPP, MAN1C1, FADS3, ABHD16A, CXCR1, EPHA10, FER1L6, ATP5F1C, BEST2, BRI3, CDC42EP5, MPP1, GAL3ST2, CDC42EP1, CYP4F2, KDELR3, FERMT1, CLN3, CRB3, ABCA10, CNTNAP3, CDH17, CD300LF, CDH5, DTX3L, CYB561, SLC25A31, CLDN11, KCNIP3, ATP1A2, ATP2A2, CADPS, AVEN, CERS6, CD300A, CXADR, GRAMD1A, CIB1, ORAI1, ADGRG6, CEACAM6, DCXR, ACKR2, ARL4C, CHST5, ARHGEF4, ABHD12, CNPPD1, EBP, BLNK, B3GNT7, ALG14, CHMP2B, CEACAM3, ALDH3A2, CYP2C9, DIP2A, IBTK, ABCC5, SMPD4, SLC9A3R2, NISCH, LRFN5, SLC16A6, MYZAP, LHFPL2, KCNN3, GIPC1, NDUFS1, GPR153, MS4A12, FUT3, GFRA2, GLUL, HSP90AA1, IL17RE, KIAA1109, MCUB, MARCKSL1, MTCH2, EFHD2, FUT6, GPER1, SLC2A3, HCN3, MBTPS1, JAML, NIPAL1, IGFLR1, IL17RA, ITGB4, LY9, LYN, GPA33, GPC1, RPS6KC1, LZTR1, ALOX12, MUC13, NFXL1, MYOC, NEU4, OR10R2, MRC1, KLRC3, MUC4, NAPEPLD, IL4R,
   [0308] b. Tissue protected: Lung TJAP1, SLC30A4, SLC7A6, EFNB3, ST3GAL6, SLC14A1, TRIM13, UBE2J1, LPCAT2, SUSD3, SERINC3, TRPV6, SLC18A2, WHAMM, SLC25A20, PTPRT, REEP2, PTPRG, STXBP6, MGAT4B, STX5, TENM3, MRGPRX2, OSBPL7, CD46, NUTF2, PALM, KCNQ1, EHD2, NECTIN1, OBSCN, PPL, SNTA1, TMEM80, TMEM119, ZNRF1, QTRT1, TBC1D3, SEZ6, GOPC, PCDH1, RNF125, TMTC4, QPCTL, RHOG, PSD4, PHACTR2, TM4SF1, STEAP1, SNX18, S100A9, PIK3R5, PHLPP2, RHOU, SIGLEC9, UBL3, CA2, ACVR1B, EHD1, GJB4, GPBAR1, FPR1, CD247, ARHGEF1, CCR7, ATP2C2, SLC44A2, GPC5, DCBLD1, ECEL1, EPHB3, CLDN18, EPHA4, DGKE, EPHX1, CALN1, HCLS1, DMTN, CEACAM5, CCDC88A, GPR82, IL17RC, AIFM2, EVA1B, CLIC2, CXCR1, DGKZ, CDC42EP1, CYB561D1, DTX3L, CYB561, C ACNA2D2, ACE, CEACAM6, BDKRB2, CXCR3, IBTK, LAMP3, MARCKSL1, EFHD2, EHD3, GPER1, GALNT13, NSMF, IL4R,
   [0309] c. Tissue protected: Skin TMEM243, TRDN, TJAP1, SUN3, TMEM138, TMEM237, TMCC1, CLEC10A, MGAT4C, ST3GAL6, PERP, STRA6, RXFP1, SOX10, SNTG2, RHOV, SLC5A6, SLC6A1, SLC6A6, PITPNM1, SEC13, SLC41A2, TMEM97, NPDC1, RALGPS2, GRIK2, MPP7, RAC1, NTM, PTGS2, SLC26A9, RAC3, PKHD1L1, RGS16, TMEM40, VPS26B, MTMR2, RHBDL2, REEP2, TMEM45A, MGAT4B, STX5, STYK1, TMEM134, PCDH19, SLC10A6, SLC9A3, IFI27, TENM3, STXBP3, TAOK2, MITD1, MUC15, NEU3, OLFM2, KCNAB1, LRRC55, PROM2, NUTF2, PALM, PLPP7, LAX1, LYPD3, KRT1, PLA2G4E, SLC8A1, NAALADL2, SORD, DMPK, NECTIN1, OBSCN, PPL, SLC43A3, TRPM2, SELENOT, SLC9A1, SNTA1, TMEM79, SLC7A7, SRC, TUB, YRDC, ZP2, ZNRF1, TMEM69, THBD, TACSTD2, UGT2B15, SLC35A3, GOPC, RNF125, TMTC4, QPCTL, SLC28A3, SLC45A4, S1PR5, PARD3B, SMIM6, PHACTR2, MIA3, NGFR, SSTR1, TMEM204, SNX18, SNORC, SH3KBP1, LY6D, S100A9, RHOU, SELENOK, MSMO1, NAPB, RIPK4, SIGLEC9, TRAF3IP3, TYRO3, TAS2R38, TRPC6, COL17A1, EMC9, FAM83B, CYBA, GJB4, SYK, FA2H, FPR1, ARHGEF1, CYP2W1, ATP2C2, DSP, GPC5, CD177, GLP2R, ANO7, DCBLD1, FYN, FRS3, EPHB3, CYP4F12, CYP4F3, FAM126B, EPHA4, GPR84, ENOX2, CALN1, DMTN, FAT2, CD99, IL1RAP, CD248, WDPCP, CAPNS2, ARFGEF3, CARMIL2, KPNA2, MALL, GDAP1, DEF6, DSC3, GSDMA, FGFBP1, LRRC37B, EVA1B, SLC7A8, LPP, FADS3, EPHA10, B3GNT4, DSG1, BRI3, CDC42EP1, KDELR3, FERMT1, ABCA10, CCR2, CDH5, DTX3L , CYB561, SLC25A31, MS4A1, AVEN, CAV3, CXADR, CD1D, ASPRV1, CIB1, ORAI1, ACSBG1, DSG3, DCXR, ACKR2, CLEC2A, CNPPD1, ATP12A, BLNK, ALDH3A2, KCNJ11, IBTK, ABCC5, NISCH, MYZAP, GIPC1, GPR153, IL17RE, KIAA1109, MCUB, MARCKSL1, FGFR3, GPER1, NIPAL1, TACR1, ITGB4, GPC1, RPS6KC1, ALOX12, OR10R2, NCS1, IL4R, TMEM243, TCTN2, SLC30A4, TECR, MS4A8, TRIM13, UBE2J1, ULBP3, LPCAT2, SUSD3, TYR, PEMT, NTRK1, GOLGA8B, HRAS, PLA2G4F, RHBG, USP8, YIF1B, PLN, PTPRT, KRAS, RASA4, NRAS, TECTA, GNPNAT1, OSBPL7, CD46, ICAM3, KCNQ1, ST7, SMIM18, TMEM80, TMEM143, TMEM119, QTRT1, TBC1D3, DCT, PRNP, SNTB1, SH2D3C, PCDH1, RHOG, TM4SF1, STK17B, PMEL, SEMA5B, PHLPP2, ARHGAP27, TMIGD2, TCTN3, UPK3A, DTL, CNTN3, EHD1, GSDMC, KCTD3, IGSF3, ADCY7, EVI2A, TM7SF2, GBF1, CYB561A3, FCGR2B, GOLGA8A, FAM210A, ADGRE1, CEACAM5, GPAT2, CD82, CNR1, DNER, FGD2, FAM241B, IGSF11, IL17RC, CPTP, CXCR1, ATP5F1C, DGKZ, FNBP1, CYB561D1, ATP2A2, CERS6, CDH13, ATG2A, BDKRB2, B3GNT7, ALG14, ADGRA1, CHMP2B, LHFPL2, LHFPL6, MUC21, NDUFS1, GFRA2, EFHD2, EHD3, JAML, IL17RA, KIT, LZTR1, KIAA0040, ,
   [0310] d. Tissue protected: Liver TRDN, TJAP1, TMEM138, TECR, TMCC1, MAP1LC3A, CLEC10A, CREB3L3, ST3GAL6, SLC14A1, STRA6, TRIM13, UBE2J1, PCSK5, SLC6A4, LPCAT2, SYNE3, SUSD3, SLC25A40, SLCO1B3, SLC41A2, SLCO1B1, PEMT, SLC27A5, NPDC1, NTRK1, SERINC3, SLC18A2, PTPRD, KSR2, MTMR2, PTGDR2, SLC25A20, PTPRT, RDH16, LIN7A, TMEM45A, MGAT4B, RASA4, STX5, PCDH19, TENM3, SYNGR4, TAOK2, MITD1, PRRT2, GNPNAT1, MRGPRX2, CD46, OLFM2, LRRC55, KCNQ1, SLC8A1, SORD, NECTIN1, OBSCN, LDLRAD3, RFTN1, SELENOT, TMEM132A, TFR2, TUB, VPS35L, ZNRF1, TNS2, UGT2B15, SLC25A25, ST7L, GOPC, PCDH1, SLC45A4, SORT1, PARD3B, MIA3, SLCO2B1, TMEM204, PPM1L, TEX261, MSMO1, NAPB, SIGLEC9, TYRO3, TM4SF4, SLC30A10, CA2, ACVR1B, GSDMB, FKRP, FMO5, GLRB, CYP2W1, CYP2D6, GJA5, CD177, CEACAM1, CACNA1A, FYN, GAS2, EPHB3, CYP4F12, CYP4F3, RASGRP2, CAPRIN2, CYP2A7, EPHA4, HEPACAM, EPHX1, CYP4F11, FOLH1, CYP1A2, DMTN, CYP3A4, FAM210A, CEACAM5, CYP2A6, CARMIL2, CYP4V2, DEPDC5, KPNA2, MALL, GPRC5B, IL17RC, NINJ1, CYP2C8, DHCR24, LRRC37B, EVA1B, GPAM, HSD17B2, MAL2, MAN1C1, CYP2C19, FADS3, AQP9, ATP5F1C, BRI3, CYP4F2, FERMT1, CRB3, ASGR1, CYB561D1, CDH5, DTX3L, ABCB11, ATP1A2, CYP2A13, AVEN, CYP2E1, CXADR, GRAMD1A, DCXR, EPB41L5, HSD11B1, BACE2, CD320, EBP, ASGR2, ATG2A, CYP3A43, CHMP2B, ALDH3A2, KCNJ11, CYP2C9, IBTK, SMPD4, SLC9A3R2, NISCH, SLC16A6, MYZAP, LHFPL2, MFAP3L, GIPC1, LIMS2, NDUFS1, GLUL, IL17RE, MTCH2, GPR15, HCN3, MBTPS1, NIPAL1, IGFLR1, IL17RA, ITGB4, RPS6KC1, LZTR1, ALOX12, OR10R2, ABCC2, NAPEPLD, NPC1L1,
   [0311] e. Tissue protected: Kidney (glomeruli) ZDHHC16, TMEM138, TECR, TMCC1, ZAP70, MGAT4C, ST3GAL6, SLC14A1, UBE2J1, KDR, SYNE3, SUSD3, SLC45A1, PEMT, RALGPS2, RAC1, PODXL, PLA2G4F, PILRA, PDGFRB, RAC3, PKHD1L1, TRPV6, USP8, YIF1B, WHAMM, KSR2, PARVB, PTPRT, PTPRG, MRGPRF, SLC34A1, TPSG1, STX5, PECAM1, SCUBE1, TECTA, TENM3, PLA2R1, CD46, PTH2R, MCAM, NEU3, KCNAB1, LRRC55, PROM2, NUTF2, PALM, MAST1, KCNQ1, MAP6, NOS3, EHD2, MPP5, NECTIN1, LDLRAD3, NPHS2, SLC43A3, SLC9A1, ST7, SNTA1, SCARF1, SMIM18, TUB, TMEM119, VPS35L, ZNRF1, TSPAN7, TTC7B, TNS2, ZFYVE9, STK10, GOPC, PCDH1, RNF125, SNCA, SLC45A4, PSD4, SORT1, PARD3B, SNX6, PHACTR2, STK17B, THSD7A, SNX18, PITPNM3, PTPRO, RHOU, NAPB, TYRO3, ZBED3, PRKCZ, FAM83B, EHD1, ATP2C2, GPC5, CEACAM1, DCBLD1, FYN, GAS2, FAM107A, ADGRF1, CD34, FAM126B, RASGRP2, EVI2A, CALN1, DMTN, ENG, CD99, CD248, DOCK5, FAM210A, ADGRE1, CR1, FGD2, ARFGEF3, FAM241B, GPR82, GPRC5B, EVA1B, MAS1, LPP, ADGRL4, CLIC2, FADS3, FNBP1, C DC42EP1, CBL, FERMT1, CLN3, CRB3, ACKR1, DTX3L, CHRM1, CERS6, CXADR, CDH13, EPB41L5, BBS7, SLC9A3R2, GIPC1, LIMS2, GPR153, IL17RE, I TGA8, MARCKSL1, EFHD2, EHD3, GPER1, SLC2A3, MBTPS1, MLIP, JAML, GPC1, LZTR1, NFXL1, KIAA0040, NEU4, NAPEPLD, PDGFRA,
   [0312] f. Tissue protected: Kidney (tubules) TMEM231, TMEM243, TRDN, TJAP1, SUN3, TRPM3, TMEM138, TECR, TMEM237, TMCC1, TBC1D3G, TREH, MS4A8, ATP8B2, MGAT4C, ST3GAL6, THY1, SLC14A1, STRA6, UBE2J1, SELPLG, PCSK5, SLC6A4, SMIM24, SYNE3, SUSD3, SLC6A6, STIMATE, SLC12A1, TLN2, PCDHB2, PITPNM1, SLC25A40, SLC41A2, PEX1, PEMT, QRFPR, RPH3AL, SLC34A3, NTRK1, RALGPS2, GOLGA8B, GRIK2, MPP7, SERINC3, SLC28A2, RHOF, RDH11, HRAS, PTH1R, PLA2G4F, PTGER3, PKHD1L1, RHBG, RGS16, USP8, VPS26B, YIF1B, WHAMM, PTPRD, PARVB, RHBDD2, PLCB3, PCDHA4, PDE2A, RHBDL2, SLC25A20, PTPRT, PSCA, KRAS, LIN7A, MRGPRF, TMEM45A, STXBP6, MGAT4B, SLC34A1, TRPM7, RASA4, STX5, PRICKLE1, NRAS, STYK1, TMEM134, PCDH19, SLC9A3, IFI27, TENM3, STXBP3, MITD1, MUC15, PEX10, PRRT2, GNPNAT1, OSBPL7, CD46, NEU3, OLFM2, KCNAB1, LRRC55, PROM2, NUTF2, PANX2, PALM, PLPP7, KCNQ1, ITPR1, SLC8A1, NAALADL2, SORD, EHD2, MPP5, NECTIN1, OBSCN, LDLRAD3, NALCN, PPL, NKAIN4, SLC51B, RFTN1, SLC43A3, TRPM2, SELENOT, SLC9A1, UGT3A1, ST7, SNTA1, TMEM132A, VSIG10, ATP6V0A4, SLC7A7, SRC, TUB, TMEM80, TMEM119, VPS35L, ZP2, ZNRF1, QTRT1, TMEM252, TMEM174, TTC7B, TBC1D3, TMEM41A, TSPAN8, PLAUR, ZFYVE9, FASLG, SEMA6B, SNTB1, SIRT2, SLC22A2, SLC52A3, SH2D3C, GOPC, PCDH1, RNF125, QPCTL, RHOG, SLC28A3, SLC45A4, SCAMP5, SLC22A8, SORT1, PARD3B, PIGZ, SNX6, SMIM6, PHACTR2, SLC6A18, SLC13A2, TMEM213, MIA3, SLC5A1, STK17B, SIGLEC14, SSTR1, TMEM204, TMEM184A, SLC4A4, SNX18, SNORC, SLC23A1, SEC11C, TEX261, PIK3R5, PKHD1, RHOU, SLC35G2, SLC4A5, MSMO1, OPRD1, NAPB, RIPK4, TMEM242, TMIGD2, TYRO3, TAS2R38, TSPAN16, UPK3A, UBL3, ZBED3, CA2, ENPP6, EMC4, PRKCZ, ACVR1B, IYD, DPEP1, EMC9, FAM83B, EHD1, ERMP1, GSDMB, DLK1, GPBAR1, FKRP, FMO5, EMC6, GLRB, GSDMC, SYK, ARHGEF1, CPNE6, ATP2C2, SLC44A2, GJA5, GPC5, ADCY7, CD177, DCBLD1, GAS2, FAM107A, EPHB3, FNDC5, CYP4F12, CYP4F3, DOCK2, CLCNKB, FAM126B, CLCNKA, EPHA4, ENOX2, EVI2A, FAM169A, TM7SF2, CASR, CYP4F11, FOLH1, GBF1, DMTN, GOLGA8A, ATP11B, IL1RAP, CD248, FAM210A, ADGRE1, WDPCP, FRRS1L, CARMIL2, CA4, CHMP5, CYP4V2, DEPDC5, KPNA2, FAM241B, GDAP1, GNG11, GLIPR1L2, LPXN, GPR82, KIAA0319, GPRC5B, IGSF11, DHCR24, LRRC37B, LRFN4, CPTP, SLC7A8, MAL2, MAGI1, FPGS, LPP, MAN1C1, FADS3, ABHD16A, BSND, CXCR1, EPHA10, AQP6, ATP5F1C, DSG1, BRI3, CDC42EP5, MPP1, CYP4F2, FERMT1, CDC42SE1, CRB3, CCR2, CDH5, CLDN10, DUSP15, DTX3L, SLC25A31, ACE, CATIP, ATP2A2, AVEN, CERS6, CAV3, CPT1B, COX7B, CXADR, GRAMD1A, CIB1, DCXR, ACKR2, ARL4C, ARHGEF4, EPB41L5, EBP, ATP12A, BLNK, C5AR1, CYP3A43, CHMP2B, ALDH3A2, DIP2A, IBTK, ABCC5, SMPD4, LRFN2, NISCH, SLC16A6, MYZAP, LHFPL2, KCNJ10, KCNJ12, MFAP3L, GIPC1, NDUFS1, FUT3, GFRA2, IL17RE, KIAA1109, MCUB, MARCKSL1, MTCH2, EHD3, FUT6, GPER1, HCN3, MBTPS1, MS4A4A, MLIP, JAML, NIPAL1, IGFLR1, IL17RA, FMO1, GPC1, RPS6KC1, LZTR1, ALOX12, NFXL1, KIAA0040, MYOC, NXPE2, IL23R, OR10R2, MRC1, NSMF, ABCC2, NAPEPLD, KCTD8, IL4R, NPC1L1,
   [0313] g. Tissue protected: Heart (cardiomyocytes) TJAP1, TCTN2, SLC30A4, TMEM138, TECR, TMEM237, TMCC1, SLC7A6, EFNB3, ATP8B2, CD36, MGAT4C, SLC46A1, RASL10B, ST3GAL6, SLC14A1, STRA6, TMEM106B, PCSK5, LPCAT2, SUSD3, SLC6A6, TLN2, PITPNM1, SEC13, SLC41A2, PEX1, PEMT, NPDC1, NTRK1, RALGPS2, GRIK2, RAC1, SERINC3, PLA2G4F, RAC3, PKHD1L1, USP8, VPS26B, YIF1B, WHAMM, PTPRD, PARVB, POPDC2, P2RY6, SLC25A20, PLCH2, PLN, MRGPRF, SHISA4, MGAT4B, RASA4, SGCG, SRL, PCDH19, SLC9A3, TECTA, TENM3, MITD1, PRSS8, PRRT2, OSBPL7, CD46, MCAM, OLFM2, LRRC55, ART3, PLPP7, KLHL41, KCNQ1, ITPR1, SLC8A1, DMPK, EHD2, NECTIN1, OBSCN, SLC43A3, SIPA1, RYR2, SELENOT, SLC9A1, ST7, SNTA1, TMEM132A, TMEM236, SLC7A7, SRC, YRDC, TMEM143, TMEM119, TREML1, VPS35L, ZP2, ZNRF1, QTRT1, TTC7B, TBC1D3, TMEM41A, SEMA6B, SLC25A25, SNTB1, SIRT2, SH2D3C, GOPC, PCDH1, QPCTL, SLC45A4, SCAMP5, RAB27A, RAB11FIP4, SORT1, PIGZ, RYR1, SLAMF8, SNX6, SMIM6, PHACTR2, TM4SF1, MIA3, SLCO2B1, STK17B, TMEM204, PPM1L, SEMA5B, TEX261, RHOU, SLC35G2, SLC15A3, MSMO1, NAPB, TYRO3, TAS2R38, TCTN3, TRPC6, UPK3A, UBL3, ZBED3, CNTN3, EMC9, EHD1, GSDMB, FKRP, EMC6, MMP27, KCTD3, FPR1, CYP2W1, GOLPH3, ATP2C2, DSP, ABCG2, GPC5, ADCY7, CDH15, ADRA1A, DCBLD1, FRS3, EPHB3, FNDC5, CYP4F12, CYP4F3, ADGRF1, FAM126B, RASGRP2, CAVIN4, CAPRIN2, SLC2A4, EPHA4, GPR84, DGKE, TM7SF2, HHATL, FAM168B, CALN1, GBF1, CYB561A3, FCGR2B, CHRNA1, IL1RAP, CD248, WDPCP, GPAT2, FGD2, ARFGEF3, CARMIL2, CHMP5, CYP4V2, DEPDC5, KPNA2, MALL, FAM241B, GPR82, CAMK2B, GPRC5B, IGSF11, IL17RC, LRRC37B, EVA1B, MBOAT7, CPTP, LPP, MAN1C1, ADGRL4, CLIC2, FADS3, ABHD16A, CXCR1, EPHA10, FCGRT, ATP5F1C, B3GNT4, DGKZ, DMD, FERMT1, CDC42SE1, CLN3, ATP1A3, CNTNAP3, CCR2, DTX3L, CSF3R, CYB561, SLC25A31, ATP1A2, ATP2A2, CADPS, AVEN, CAV3, CD300A, CPT1B, COX7B, CXADR, CDH13, CD1D, CIB1, ORAI1, AKAP6, ADGRG6, DCXR, ARL4C, ARHGEF4, BACE2, CNPPD1, BLNK, ALDH3A2, IBTK, JPH1, ABCC5, SMPD4, NISCH, SLC16A6, MYZAP, LHFPL2, MFAP3L, GIPC1, GPR182, LIMS2, NDUFS1, FUT3, IL17RE, KIAA1109, MCUB, MTCH2, EHD3, FUT6, GPER1, GPR15, HCN3, MBTPS1, MLIP, IGFLR1, ITGB4, IL18RAP, RPS6KC1, LZTR1, ALOX12, NFXL1, OR10R2, MCEMP1, NAPEPLD, DES, IL4R,
   [0314] h. Tissue protected: Thyroid TJAP1, TCTN2, SLC30A4, TMEM138, TECR, TMEM237, TMCC1, ATP8B2, SLC46A1, ST3GAL6, TMEM100, STRA6, TMEM106B, TRIM13, UBE2J1, VPS33B, PCSK5, TMEM251, LPCAT2, SLC6A6, TLN2, PCDHB2, SEC13, PEX1, PEMT, QRFPR, NPDC1, NTRK1, GRIK2, MPP7, SERINC3, HRAS, TPO, PKHD1L1, RGS16, TRPV6, TMEM40, VPS26B, YIF1B, WHAMM, RHBDD2, RHBDL2, SLC25A20, KRAS, LIN7A, STXBP6, PRICKLE1, NRAS, PCDH19, IFI27, TENM3, STXBP3, TAOK2, MITD1, MUC15, NMUR2, OSBPL7, CD46, NEU3, OLFM2, KCNAB1, PSD3, LRRC55, PROM2, NUTF2, PALM, PLPP7, MAST1, KCNQ1, SLC8A1, SORD, NECTIN1, OBSCN, LDLRAD3, NALCN, PPL, PORCN, SLC43A3, TRPM2, SELENOT, SLC9A1, ST7, SLC7A7, TUB, YRDC, TMEM80, TEX264, TMEM119, VPS35L, ZNRF1, QTRT1, TTC7B, TBC1D3, TMEM41A, ZFYVE9, FASLG, SLC25A25, SLC52A3, GOPC, PCDH1, RNF125, TMTC4, QPCTL, SLC45A4, SLC12A6, SORT1, PARD3B, SMIM6, PHACTR2, MIA3, SLCO2B1, STK17B, TMEM204, PPM1L, SNX18, SH3KBP1, TEX261, PIK3R5, RHOU, MSMO1, SYN3, SIGLEC9, TMIGD2, TYRO3, TCTN3, UBL3, ZBED3, C19orf18, PRKCZ, ACVR1B, IYD, CNTN3, DUOX1, EMC9, FAM83B, EHD1, SYK, KCTD3, CYP2W1, GOLPH3, ABCG2, GPC5, DCBLD1, FYN, EPHB3, CLCNKB, FAM126B, RASGRP2, CLCNKA, EPHA4, DGKE, GCSAM, FAM168B, CALN1, GBF1, DMTN, FCGR2B, CD99, IL1RAP, FAM210A, ADGRE1, WDPCP, GPAT2, CNR1, FGD2, ARFGEF3, CARMIL2, CHMP5, IPCEF1, DEPDC5, KPNA2, MALL, FAM241B, GDAP1, LPXN, CAMK2B, IGSF11, IL17RC, EVA1B, MAGI1, ADGRL4, CLIC2, FZD5, CXCR1, EPHA10, FER1L6, ATP5F1C, FNBP1, CDC42EP1, FERMT1, CRB3, ABCA10, DTX3L, CYB561, ATP2A2, CRHR1, AVEN, CERS6, CD300A, CXADR, CIB1, ORAI1, DCXR, ACKR2, ARL4C, ARHGEF4, CD320, BLNK, C5AR1, CDH10, CHMP2B, CEACAM3, ALDH3A2, AP3B2, IBTK, SMPD4, NISCH, MTNR1B, MYZAP, LHFPL2, GIPC1, NDUFS1, FUT3, GFRA2, GLUL, IL17RE, KIAA1109, MARCKSL1, FUT6, GPER1, GPR15, HCN3, MBTPS1, JAML, IGFLR1, IL17RA, ITGB4, LYN, LZTR1, OR10R2, NAPEPLD, NCS1,
   [0315] i. Tissue protected: Pancreatic endocrine cells (Islets) TJAP1, SLC30A4, STXBP1, MAP1LC3A, UBE2J1, STX1A, RAB3A, PITPNM1, SEC13, RTN1, PEMT, QRFPR, RPH3AL, NPDC1, NTRK1, SCG3, POMGNT2, PKHD1L1, RGS16, YIF1B, PTGDR2, RHBDL2, SLC25A20, PTPRT, RAB3B, STX5, PRICKLE1, STXBP3, TAOK2, MITD1, PTPRN, CD46, PTH2R, OLFM2, LRRC55, NUTF2, SLC8A1, NECTIN1, OBSCN, NECAB2, SLC17A6, TRPM2, SLC9A1, SMIM18, SV2A, TUB, YRDC, TM4SF20, ZNRF1, TMEM69, TSPAN7, TTC7B, TNS2, TBC1D3, PLAUR, ZFYVE9, SLC30A8, PRNP, FASLG, SLC35A3, SLC25A25, STK10, GOPC, PCDH1, RNF125, QPCTL, SCAMP5, RAB27A, SYP, SLC12A6, SORT1, PTPRN2, SMIM6, PHACTR2, MIA3, SLCO2B1, SIGLEC14, SSTR1, TMEM204, PPM1L, SNORC, TEX261, MAPK10, RHOU, SLC35G2, SLC4A5, SELENOK, MSMO1, OPRD1, NAPB, SIGLEC9, EMC4, PRKCZ, ERMP1, DLK1, FMO5, DGCR2, KCTD3, CYP2W1, GOLPH3, EPHB3, GNAO1, CAPRIN2, FAM169A, FBXO2, GCSAM, CASR, AQP8, CD99, WDPCP, CD82, ARFGEF3, CARMIL2, CHMP5, CYP4V2, KPNA2, FAM241B, GDAP1, IGSF11, IL17RC, SLC7A8, MAGI1, CXCR1, EPHA10, DGKZ, CDC42EP1, FERMT1, ABCA10, CDH5, CYB561, AMPH, ATP1A2, ATP2A2, CADPS, CRHR1, AVEN, CXADR, CD1D, ARL4C, ARHGEF4, EPB41L5, BBS7, GAD2, ALDH3A2, KCNJ11, IBTK, ABCC5, SMPD4, NISCH, SLC16A6, GIPC1, GPR153, FUT3, GFRA2, GLUL, IL17RE, MTCH2, FUT6, GPER1, HCN3, MBTPS1, IGFLR1, FMO1, OR10R2, NAPEPLD,
   [0316] j. Tissue protected: Pancreatic exocrine cells TJAP1, TCTN2, TMEM138, TMEM237, TMCC1, ATP8B2, CLEC10A, SLC46A1, RASL10B, ST3GAL6, TBC1D3D, TMEM100, STRA6, UBE2J1, SELPLG, PCSK5, SLC6A6, STIMATE, SEC13, SLC41A2, PEX1, PEMT, RPH3AL, TMEM97, NTRK1, GRIK2, SEC16B, HRAS, POMGNT2, PKHD1L1, RGS16, TMEM40, VPS26B, YIF1B, WHAMM, PCDHA4, RHBDL2, SLC25A20, PTPRT, PSCA, KRAS, MRGPRF, STXBP6, STX5, NRAS, STYK1, SCUBE1, IFI27, TENM3, STXBP3, MITD1, MUC15, GNPNAT1, MRGPRX2, CD46, PTH2R, NEURL1, OLFM2, KCNAB1, LRRC55, PROM2, NUTF2, PALM, PLPP7, KCNQ1, SLC8A1, SORD, NECTIN1, OBSCN, LDLRAD3, NALCN, PPL, RFTN1, SLC43A3, TRPM2, SELENOT, SLC9A1, UGT3A1, ST7, SNTA1, VSIG10, YRDC, TMEM80, TMEM119, ZNRF1, UNC13D, TTC7B, TBC1D3, TRAT1, TMEM41A, TSPAN8, PLAUR, TBC1D3E, ZFYVE9, TACSTD2, FASLG, SNTB1, GOPC, PCDH1, RNF125, TMTC4, SYCN, QPCTL, SLC28A3, SLC45A4, SCAMP5, RAB27A, SLC12A6, PARD3B, SMIM6, PHACTR2, TM4SF1, MIA3, SLCO2B1, SSTR1, TMEM204, SLC4A4, SEC11C, PKHD1, RHOU, SLC4A5, SELENOK, ARHGAP27, NAPB, TRAF3IP3, TAS2R38, TCTN3, TM4SF4, CA2, DTL, PRKCZ, ACVR1B, DPEP1, EMC9, EMC6, GLRB, GP2, SLC2A12, SYK, KCTD3, FA2H, GOLPH3, DSP, ADCY7, CYSTM1, EPHB3, ADGRF1, RASGRP2, DGKE, EVI2A, FBXO2, GCSAM, EPHX1, GBF1, FCGR2B, AQP8, ATP11B, CD248, FAM210A, WDPCP, GPAT2, FGD2, ARFGEF3, CARMIL2, CA4, CHMP5, CYP4V2, KPNA2, MALL, GPR82, GPRC5B, IGSF11, IL17RC, LRRC37B, EVA1B, MAGI1, FPGS, MAN1C1, FADS3, FZD5, EPHA10, ATP5F1C, BRI3, CDC42EP1, KDELR3, FERMT1, CDC42SE1, CLN3, CRB3, ABCA10, CNTNAP3, CDH5, CFTR, CLDN10, CYB561, SLC25A31, CADPS, AVEN, AQP5, CD300A, CXADR, CIB1, CHST4, ARL4C, B3GNT7, ALG14, BBS7, CHMP2B, AQP12A, AQP12B, IBTK, SMPD4, NISCH, LRFN5, MYZAP, GIPC1, NDUFS1, FUT3, GFRA2, IL17RE, KIAA1109, MCUB, MARCKSL1, MTCH2, EFHD2, FUT6, GPER1, MBTPS1, IGFLR1, IL17RA, LYN, RPS6KC1, NFXL1, MYOC, OR10R2, NAPEPLD,
[0317] 4. Cancer treated: urothelial cancer
   [0318] a. Tissue protected: Colon TMEM158, UGT2A3, TMEM60, MS4A8, MAP1LC3A, CACNB2, CD36, ILK, MGAT4C, SCGN, TMEM106B, UBE2J1, SLC47A1, SYT13, PCSK5, STX1A, RAB17, ENPP1, SMIM24, SLC27A2, SH3BP4, SLC19A3, MGAM, PEX11G, BVES, P2RX6, PILRA, MUC12, VPS26B, KLRG1, PARVB, DLC1, RNF144B, RAB3B, PSCA, MRGPRF, TPSG1, TRPM7, SLC18A1, SPATA9, SLCO4A1, STYK1, SLC9A3, IFI27, ITLN1, PTGDR, SYNGR4, SYBU, STXBP3, MITD1, PEX10, OSBPL7, MYORG, MCOLN1, LRRN2, OBSCN, LDLRAD3, AATK, UGT2B4, TMEM72, TMEM132A, UGT2B17, VSIG10, RNF112, SYT11, TMEM236, SLC7A7, UST, UGT2B28, QTRT1, SLC16A14, TMEM253, UNC13B, PLAUR, PRRG2, UGT2B15, SLC35A3, SEZ6, SCAMP5, RAB27A, RAB43, PTPRN2, RUFY3, SNX6, SEC11C, PIK3R5, SCN7A, ARHGAP21, ARHGAP27, NAPB, RNF186, TMEM219, TRAF3IP3, VASN, UBL3, TMEM39B, CRK, CSK, CA2, PRKCZ, GGT1, DPEP1, GSDMB, IL9R, AIF1L, ADCY10, BMPR1A, CLCA1, GLP2R, AP4M1, FPR2, FKBP2, CHDH, ADGRF1, FAM126B, HTR1A, AKR1A1, ENOX2, CALN1, CHODL, CA4, CYP4X1, DEPDC5, GNG11, KCNMA1, LRRC37B, EVA1B, CPTP, HSD17B2, MAGI1, CXCR1, ANKRD13B, AQP1, BEST2, ABCG8, CDC42EP5, BCL2, MPP1, GAL3ST2, HTR4, B3GNT8, ELOVL7, AP1S2, CDHR2, CLN3, CRB3, ANPEP, CNTNAP3, CDH17, C3AR1, CLDN11, KCNIP3, ATP1A2, CADPS, GRAMD1A, ADGRG6, ASIC5, CEACAM6, ACKR2, ANXA13, BBS1, ARHGEF4, ASPHD1, ABHD12, C12orf66, BLNK, PAM, ALG14, CEACAM3, ALDH3A2, B3GAT1, CYP2C9, DIP2A, IBTK, LRFN5, MYZAP, NDUFS1, ALOX15B, MS4A12, MCUB, NIPAL4, IGFLR1, LY9, GAL3ST1, GPA33, RPS6KC1, LZTR1, MUC13, HPS6, NEU4, OR10R2, MRC1, KLRC3,
   [0319] b. Tissue protected: Lung VSIG4, SLC30A4, EFNB3, CACNB2, CD300C, ILK, TRIM13, UBE2J1, SLC22A15, SLC25A17, RAB17, SLC19A3, BVES, SLC18A2, IL10RB, REEP2, RNF144B, PTPRG, SGIP1, SYBU, MXRA7, OSBPL7, KIRREL3, EHD2, OBSCN, CD84, QTRT1, SLC16A14, TBC1D3, PRRG2, SEZ6, RHOG, PSD4, RAB43, RUFY3, STEAP1, PIK3R5, SCN7A, SIGLEC9, UBL3, CA2, EHD1, CD247, CCR7, SLC44A2, AOC3, ECEL1, FKBP2, CLDN18, CALN1, KCNMA1, AIFM2, EVA1B, FES, CLIC2, CXCR1, ANKRD13B, AQP1, ABCG8, ANK2, AQP4, C3AR1, CACNA2D2, ACE, CEACAM6, ASPHD1, CADM1, CXCR3, IBTK, LAMP3, ALOX15B, EHD3, HPS6, NSMF, LRRK2,
   [0320] c. Tissue protected: Skin SUN3, CACNB2, CLEC10A, CD300C, MGAT4C, PERP, STRA6, SLC47A1, SOX10, SLC25A17, RAB17, ENPP1, SLC6A1, SH3BP4, VPS26B, IL10RB, REEP2, RNF144B, GPIHBP1, TYROBP, STYK1, SLC9A3, IFI27, STXBP3, MITD1, MXRA7, LANCL2, F2R, MCOLN1, LRRN2, OBSCN, AATK, TRPM2, RMC1, SLC7A7, YRDC, SLC16A14, PRRG2, UGT2B15, SLC35A3, ARHGAP21, NAPB, SIGLEC9, TRAF3IP3, TMEM39B, CRK, CYBA, FFAR2, FA2H, CYP2W1, ADCY10, BMPR1A, CDH6, GLP2R, CACNA2D1, FYN, FPR2, FKBP2, FAM126B, ENOX2, ATRAID, CALN1, IL1RAP, MALL, DEF6, LRRC37B, EVA1B, B3GNT4, DSG1, ABCG8, ELOVL7, CD81, ANK2, MS4A1, CD1D, ASPRV1, ASIC5, DSG3, ACKR2, ASPHD1, BLNK, PAM, ALDH3A2, IBTK, ABCC1, MYZAP, MCUB, NIPAL4, RPS6KC1, OR10R2, NCS1, TCTN2, SLC30A4, MS4A8, APLNR, TRIM13, UBE2J1, SYT13, TYR, DLC1, PLN, SLCO4A1, KCNQ4, SGIP1, OSBPL7, MYORG, SLC25A15, UST, QTRT1, TBC1D3, DCT, UNC13B, PRNP, RHOG, RUFY3, PMEL, SEMA5B, ARHGAP27, TMEM219, EHD1, AIF1L, TM7SF2, C YB561A3, GPAT2, DNER, FGD2, CYP4X1, CPTP, CXCR1, BCL2, B3GNT8, CDH13, BBS1, CPNE2, AP4E1, ATG2A, ALG14, MUC21, NDUFS1, EHD3, LZTR1, ,
   [0321] d. Tissue protected: Liver VNN1, SLC13A5, MAP1LC3A, APLNR, CACNB2, CLEC10A, CD300C, CREB3L3, STRA6, TRIM13, UBE2J1, SLC47A1, SYT13, PCSK5, SLC25A17, RAB17, ENPP1, SLC27A2, SLCO1B3, SLCO1B1, SLC27A5, SLC19A3, PEX11G, SLC18A2, KSR2, RNF144B, LIN7A, KCNQ4, SYNGR4, MITD1, PRRT2, NAT8, MYORG, MCOLN1, KIRREL3, LRRN2, SLC25A15, OBSCN, LDLRAD3, AATK, UGT2B4, TMEM132A, TFR2, SLC16A14, TNS2, UNC13B, UGT2B15, SLC25A25, ST7L, RAB43, RUFY3, SLCO2B1, TEX261, ARHGAP21, NAPB, TSPAN2, TMEM219, SIGLEC9, VASN, TM4SF4, CRK, CA2, GGT1, GSDMB, GPR37, CYP2W1, CYP2D6, BMPR1A, C ACNA2D1, CACNA1A, FYN, FPR2, GAS2, SLC2A2, CHDH, HTR1A, AKR1A1, CYP2A7, FOLH1, CYP1A2, CYP3A4, CYP2A6, CYP2B6, FMO3, DEPDC5, MALL, KCNMA1, GPRC5B, NINJ1, CYP2C8, LRRC37B, EVA1B, FES, KMO, HSD17B2, MAL2, CYP2C19, BCL2L10, AQP9, ABCG8, AP1S2, CDHR2, CRB3, ANPEP, ASGR1, ADRA2B, ATP1A2, CYP2A13, GRAMD1A, ASIC5, ACAD11, BBS1, ASPHD1, HSD11B1, ASGR2, ATG2A, PIK3AP1, CYP3A43, ALDH3A2, B3GAT1, INTS2, CYP2C9, IBTK, MADCAM1, MYZAP, MFAP3L, LIMS2, NDUFS1, KCND1, GPR15, NIPAL4, IGFLR1, SLC2A8, RPS6KC1, LZTR1, HPS6, OR10R2, ABCC2, DPP4, LRRK2, SLC10A1, NPC1L1,
   [0322] e. Tissue protected: Kidney (glomeruli) ZAP70, CACNB2, ILK, MGAT4C, UBE2J1, SLC22A15, SLC47A1, MAPT, SYT13, SLC25A17, RAB17, SLC45A1, SH3BP4, SLC19A3, MGAM, KIRREL1, P2RX6, PILRA, IL10RB, KSR2, PARVB, PTPRG, MRGPRF, TPSG1, PTGDR, PLA2R1, PTH2R, F2R, KIRREL3, MAP6, NOS3, EHD2, MPP5, NKD1, LDLRAD3, NPHS2, RMC1, TSPAN7, SLC16A14, TNS2, PRRG2, SNCA, PSD4, SNX6, THSD7A, PITPNM3, PTPRO, SREBF1, SCN7A, NAPB, VASN, PRKCZ, EHD1, AIF1L, CDH6, FYN, GAS2, CD93, FAM107A, ADGRF1, CD34, FAM126B, HTR1A, CALN1, ENG, DOCK5, CR1, FGD2, KCNMA1, GPRC5B, EVA1B, MAS1, ADGRL4, CLIC2, AQP1, ABCG8, CLN3, CRB3, ACKR1, CHRM1, CDH13, ASPHD1, PAM, BBS7, B3GAT1, ABCC1, LIMS2, ITGA8, EHD3, NIPAL4, LZTR1, HPS6, NEU4, DYSF, DPP4,
   [0323] f. Tissue protected: Kidney (tubules) VNN1, SUN3, TRPM3, TBC1D3G, TREH, MS4A8, APLNR, CACNB2, ILK, MGAT4C, THY1, STRA6, UBE2J1, SLC22A15, SLC47A1, SELPLG, MAPT, TMEM240, PCSK5, RAB17, ENPP1, SMIM24, SLC5A12, SLC5A2, SLC12A1, PCDHB2, SLC27A2, SH3BP4, SCNN1D, S1PR2, SLC34A3, SLC19A3, MGAM, PEX11G, SLC28A2, RDH11, PTH1R, KIRREL1, P2RX6, VPS26B, IL10RB, PARVB, RHBDD2, DLC1, PDE2A, RALB, RNF144B, PSCA, LIN7A, MRGPRF, TRPM7, TMEM132E, PRICKLE1, SLCO4A1, STYK1, TMEM52B, KCNQ4, SLC9A3, IFI27, PTGDR, SGIP1, STXBP3, MITD1, NOS1, PEX10, PRRT2, OSBPL7, NAT8, MYORG, MCOLN1, KIRREL3, LRRN2, EHD2, MPP5, SLC25A15, OBSCN, LDLRAD3, AATK, RFTN2, UGT2B4, ATP6V1D, SLC22A6, TMEM72, TRPM2, UGT3A1, TMEM132A, VSIG10, ATP6V0A4, SLC7A7, UST, QTRT1, TMEM252, SLC16A14, TMEM174, TBC1D3, UNC13B, PLAUR, PRRG2, SLC28A1, SEMA6B, SLC22A2, RHOG, SCAMP5, RAB43, SLC22A8, SLC13A3, RUFY3, SNX6, SLC6A18, SLC13A2, TMEM213, SLC5A1, SLC4A4, SEC11C, TEX261, SREBF1, PIK3R5, PKHD1, ARHGAP21, SLC35G2, OPRD1, NAPB, TSPAN2, TMEM219, VASN, UBL3, TMEM39B, CRK, CA2, PRKCZ, GGT1, IYD, DPEP1, ENPP3, CUBN, CLSTN2, EHD1, GSDMB, DLK1, KIRREL2, CKMT2, CLTRN, SLC44A2, AIF1L, ADCY10, BMPR1A, CDH6, FAM151A, AP4M1, CPT1C, GAS2, FAM107A, FKBP2, SLC2A2, CHDH, CLCNKB, FAM126B, HTR1A, AKR1A1, ADGRG5, CLCNKA, ENOX2, FAM169A, TM7SF2, ATRAID, FOLH1, IL1RAP, CLIC4, FRRS1L, CYP2B6, CA4, FMO3, DEPDC5, GNG11, GLIPR1L2, KIAA0319, KCNMA1, GPRC5B, LRRC37B, FES, KMO, CPTP, MAL2, MAGI1, BCL2L10, CXCR1, AQP1, DSG1, ABCG8, CDC42EP5, BCL2, MPP1, HTR4, AP1S2, CDHR2, CRB3, ANK2, ANPEP, SLC7A9, CLDN10, DUSP15, FXYD2, ACE, CATIP, CLDN2, CPT1B, GRAMD1A, ASIC5, ACKR2, ANXA13, BBS1, CPNE2, ARHGEF4, AP4E1, ASPHD1, C12orf66, BLNK, PIK3AP1, C5AR1, CYP3A43, CDH16, CADM1, ALDH3A2, B3GAT1, INTS2, DIP2A, IBTK, LRFN2, MYZAP, KCNJ10, KCNJ12, MFAP3L, NDUFS1, ALOX15B, KCND1, MCUB, EHD3, MS4A4A, NIPAL4, IGFLR1, GAL3ST1, RPS6KC1, LRP2, LZTR1, HPS6, MFSD1, IL23R, OR10R2, MRC1, GRIN2D, NSMF, ABCC2, MDGA2, DYSF, DPP4, LRRK2, NPC1L1,
   [0324] g. Tissue protected: Heart (cardiomyocytes) TCTN2, SLC30A4, SPAG4, UCP3, EFNB3, APLNR, CACNB2, CD300C, CD36, ILK, MGAT4C, STRA6, TMEM106B, SLC22A15, SLC47A1, MAPT, SYT13, PCSK5, SLC25A17, RAB17, SLC19A3, PEX11G, BVES, P2RX6, VPS26B, IL10RB, PARVB, POPDC2, P2RY6, PLN, RNF144B, GPIHBP1, MRGPRF, SHISA4, INPP5D, SPATA9, SGCG, SLCO4A1, SRL, KCNQ4, SLC9A3, SGIP1, MITD1, MXRA7, PRRT2, OSBPL7, LANCL2, ART3, MYORG, KLHL41, MCOLN1, LRRN2, EHD2, SLC25A15, OBSCN, AATK, RFTN2, SIPA1, RYR2, TMEM132A, TMEM236, SLC7A7, YRDC, UST, TREML1, QTRT1, TBC1D3, PRRG2, SEMA6B, SLC25A25, SCAMP5, RAB27A, RAB11FIP4, RYR1, RUFY3, SNX6, SLCO2B1, SEMA5B, ST8SIA2, TEX261, SCN7A, ARHGAP21, SLC35G2, NAPB, TMEM219, VASN, UBL3, TMEM39B, CRK, EHD1, GSDMB, CKMT2, CYP2W1, BMPR1A, CDH6, AP4M1, CACNA2D1, CDH15, ADRA1A, CHDH, ADGRF1, FAM126B, HTR1A, CAVIN4, TM7SF2, HHATL, CALN1, CYB561A3, CHRNA1, IL1RAP, GPAT2, FGD2, CYP4X1, DEPDC5, MALL, CAMK2B, GPRC5B, LRRC37B, EVA1B, FES, CPTP, LEPROTL1, ADGRL4, CLIC2, CXCR1, FCGRT, ANKRD13B, B3GNT4, ABCG8, B3GNT8, ELOVL7, AP1S2, CD81, CDHR2, CLN3, ANK2, CNTNAP3, C3AR1, ATP1A2, CADPS, CPT1B, CDH13, CD1D, AKAP6, ADGRG6, ADRB1, ASIC5, ACAD11, BBS1, CPNE2, ARHGEF4, AP4E1, ASPHD1, BLNK, PAM, ALDH3A2, IBTK, MYZAP, MFAP3L, NCAM1, GPR182, LIMS2, NDUFS1, KCND1, MCUB, EHD3, GPR15, NIPAL4, IGFLR1, GAL3ST1, SLC2A8, IL18RAP, RPS6KC1, LZTR1, OR10R2, MCEMP1, DES, DYSF, LRRK2,
   [0325] h. Tissue protected: Thyroid TMEM158, TCTN2, SLC30A4, APLNR, CACNB2, ILK, TMEM100, STRA6, TMEM106B, TRIM13, UBE2J1, SLC22A15, SLC47A1, SYT13, PCSK5, SLC25A17, TMEM251, SLITRK4, RAB17, ENPP1, PCDHB2, SH3BP4, SCNN1D, SLC19A3, PEX11G, KCNQ5, BVES, TPO, VPS26B, IL10RB, RHBDD2, RNF144B, GPIHBP1, LIN7A, INPP5D, PRICKLE1, SLCO4A1, KCNQ4, IFI27, SYBU, STXBP3, MITD1, MXRA7, OSBPL7, LANCL2, PSD3, MCOLN1, LRRN2, SLC25A15, OBSCN, LDLRAD3, AATK, PORCN, TRPM2, SLC7A7, YRDC, UST, QTRT1, SLC16A14, TBC1D3, UNC13B, PRRG2, TNFRSF10C, RTP5, SLC25A25, RAB43, SLC26A4, RUFY3, SLCO2B1, TEX261, SREBF1, PIK3R5, ARHGAP21, SYN3, TMEM219, SIGLEC9, UBL3, TMEM39B, C19orf18, CSK, PRKCZ, IYD, EHD1, GPR37, CYP2W1, AIF1L, ADCY10, BMPR1A, CDH6, AP4M1, FYN, FPR2, FKBP2, CLCNKB, FAM126B, HTR1A, AKR1A1, CLCNKA, FCRL1, ATRAID, CALN1, IL1RAP, GPAT2, FGD2, FMO3, IPCEF1, CYP4X1, DEPDC5, MALL, CAMK2B, KCNMA1, EVA1B, FES, MAGI1, ADGRL4, CLIC2, CXCR1, ANKRD13B, ABCG8, BCL2, CRB3, ANK2, AQP4, C3AR1, CRHR1, ACKR2, BBS1, CPNE2, ARHGEF4, AP4E1, C12orf66, BLNK, C5AR1, CDH16, CEACAM3, CADM1, ALDH3A2, INTS2, AP3B2, IBTK, MYZAP, NCAM1, NDUFS1, GPR15, NIPAL4, IGFLR1, GAL3ST1, LZTR1, HPS6, MFSD1, OR10R2, GRIN2D, NCS1,
   [0326] i. Tissue protected: Pancreatic endocrine cells (Islets) SLC30A4, STXBP1, MAP1LC3A, CACNB2, SCGN, UBE2J1, MAPT, SYT13, S LC25A17, STX1A, RAB3A, RTN1, SCG3, POMGNT2, IL10RB, RAB3B, PRICKLE1, KCNQ4, SYBU, STXBP3, MITD1, MXRA7, PTPRN, LANCL2, PTH2R, MYORG, MCOLN1, KIRREL3, LRRN2, OBSCN, AATK, NECAB2, SLC17A6, ATP6V1D, TRPM2, SHISAL2B, SV2A, YRDC, TSPAN7, TNS2, TBC1D3, UNC13B, PLAUR, SLC30A8, PRNP, PRRG2, SLC35A3, SLC25A25, SCAMP5, RAB27A, PTPRN2, RUFY3, SLCO2B1, TEX261, MAPK10, ARHGAP21, SLC35G2, OPRD1, NAPB, TSPAN2, TMEM219, SIGLEC9, VASN, TMEM39B, CRK, PRKCZ, DLK1, FFAR2, DGCR2, CYP2W1, CLTRN, ADCY10, BMPR1A, CDH6, FKBP2, GNAO1, AKR1A1, FAM169A, FBXO2, CYP2B6, MAGI1, CXCR1, ABCG8, CD81, C3AR1, FXYD2, ATP1A2, CADPS, CRHR1, CD1D, ASIC5, BBS1, ARHGEF4, PAM, BBS7, CADM1, GAD2, ALDH3A2, IBTK, GNAZ, KCND1, IGFLR1, GAL3ST1, HPS6, OR10R2, MDGA2, DPP4, j. Tissue protected: Pancreatic exocrine cells TCTN2, CLEC10A, CD300C, ILK, TBC1D3D, TMEM100, STRA6, UBE2J1, SELPLG, SYT13, PCSK5, RAB17, ENPP1, SLC27A2, SH3BP4, SLC19A3, SEC16B, POMGNT2, VPS26B, IL10RB, RNF144B, PSCA, MRGPRF, SPATA9, TMEM132E, SLCO4A1, STYK1, IFI27, SYBU, STXBP3, MITD1, MXRA7, PTH2R, MYORG, MCOLN1, LRRN2, OBSCN, LDLRAD3, AATK, ATP6V1D, TMEM72, TRPM2, UGT3A1, VSIG10, YRDC, UST, SLC16A14, UNC13D, TBC1D3, UNC13B, PLAUR, TBC1D3E, TNFRSF10C, SYCN, SCAMP5, RAB27A, RUFY3, SLCO2B1, SLC4A4, SEC11C, PKHD1, SCN7A, ARHGAP21, ARHGAP27, NAPB, TMEM219, TRAF3IP3, TM4SF4, TMEM39B, CRK, CSK, CA2, PRKCZ, GGT1, DPEP1, CUZD1, GP2, KIRREL2, FA2H, ADCY10, BMPR1A, CDH6, AP4M1, FPR2, FKBP2, CHDH, ADGRF1, AKR1A1, FBXO2, GPAT2, FGD2, CA4, FMO3, CYP4X1, MALL, GPRC5B, LRRC37B, EVA1B, FES, MAGI1, LEPROTL1, AQP1, BCL2, HTR4, ELOVL7, AP1S2, CD81, CLN3, CRB3, ANPEP, CNTNAP3, CFTR, CLDN10, FXYD2, CADPS, CHST4, AP4E1, ASPHD1, C12orf66, PIK3AP1, ALG14, BBS7, CADM1, AQP12A, AQP12B, IBTK, ABCC1, LRFN5, MYZAP, NCAM1, NDUFS1, MCUB, IGFLR1, GAL3ST1, RPS6KC1, HPS6, OR10R2, LRRK2,
[0327] 5. Cancer treated: head and neck cancer
   [0328] a. Tissue protected: Colon TRDN, AXL, ZDHHC2, SLC30A7, SFT2D2, UGT2A3, TECR, TMEM237, TMEM74B, TNFSF14, TTC17, MAP1LC3A, ATP8B2, CORO7, ACY3, CHST11, FIBCD1, FCAMR, GABARAPL2, MGAT4C, SLC46A1, SCGN, ST3GAL6, SLC14A1, TMEM106B, UBE2J1, ZGRF1, SLC47A1, PIM1, ALPL, STX1A, SNX24, SMIM24, SRI, SLC26A2, TNFRSF11A, NAAA, PITPNM1, AHCYL1, SFXN5, SOCS7, PEX1, PEMT, NDUFS8, NTRK3, RNF145, SLC19A3, PARD3, ARHGAP5, RHOF, PLPP1, NOXA1, BVES, RHOH, PIGR, PLEKHA3, MUC12, TPCN1, TULP3, TJP3, VPS26B, WSCD1, TCIRG1, WHAMM, PTPRD, KLRG1, PARVB, DLC1, PCDHA4, LMAN2, PIGU, PTPRT, RAP1GAP, PSTPIP2, RAB3B, PSCA, MFSD10, MRGPRF, SEL1L3, TMEM45A, SERP1, SCARA3, TPSG1, TRPM7, SLC18A1, SLCO4A1, SPPL3, STYK1, ITGA9, MAPKAP1, SLC9A3, IFI27, ITLN1, PTGDR, ADCYAP1R1, SYNGR4, NECAP1, PLIN2, PEX10, MRGPRX2, ABCC3, OSBPL7, CD46, ABCB1, PCDH11X, GPR183, LRRC55, SLC24A3, MACF1, MGST2, MGAT4A, LRRN2, CNEP1R1, DENND5B, SORD, OBSCN, AATK, MEGF8, PNKD, UGT2B4, SLC26A3, SERP2, TMEM72, TNFAIP8L3, SELENOT, SLC3A1, TMEM132A, UGT2B17, VSIG10, RNF112, SYT11, TMEM236, VPS28, SLC7A7, TMEM143, VPS35L, UGT2B28, ZDHHC8, ZP2, VAC14, SYTL4, SYTL3, TMEM128, TMEM64, TMEM253, TBCD, UBR4, TSPAN31, TMEM41A, TSPAN8, TNFRSF14, PLAUR, SYTL2, TMEM201, UGT2B15, SLC46A2, TSC2, MCUR1, PCDH1, SLC28A3, SCAMP5, PTAFR, RAB27A, SYP, SUSD6, PIGZ, PTPRN2, SLC39A14, SLC6A12, RUFY3, SLC6A15, SERINC1, RAB31, TRPM4, VTI1B, TNFRSF10A, TMEM164, STK38L, MTG2, PPM1L, SLC25A23, SEC11C, PIK3R5, PRRT3, IMMT, SLC35B1, ARHGAP27, NAPB, RNF186, TMEM219, TMEM154, TMEM171, VASN, TAS2R38, TCTN3, TRPC6, UBL3, TMEM39B, ADCK2, ATG2B, CA2, CCR10, CDHR5, CHST3, PRKCZ, GGT1, JAM3, DPEP1, GSDMB, FKRP, FCER1A, GPC4, IL9R, GHR, SLC2A12, CX3CR1, DPY19L4, FPR1, SLC48A1, CLEC16A, FCER1G, GOLPH3, DMXL2, ABCG2, AIF1L, ARL8A, ACSL5, CLCA1, CYSLTR1, GLP2R, CEACAM1, B3GNT5, FPR2, CADM4, FAR2, CHDH, GNB5, ADGRF1, RASGRP2, HTR1A, TESC, CLN6, EPHA4, ENOX2, CTNND1, DMTN, FLNC, FXYD6, ARL8B, AQP8, CNTFR, ADGRE1, ELOVL1, CHODL, ANKRD13A, CA4, CD1E, SLC37A4, DEPDC5, DPP10, HRH1, GNG11, DGKQ, GPR82, KCNMA1, IGSF11, LPAR6, CTDNEP1, EVA1B, CPTP, GJA4, HSD17B2, GALNT16, MAGI1, FPGS, MAN1C1, AP3M1, FADS3, ABHD16A, CXCR1, FER1L6, ANO8, ANKRD13B, AQP1, BEST2, BRI3, CDC42EP5, BCL2, MPP1, HTR4, B3GNT8, UGCG, KDELR3, ELOVL7, AP1S2, CDHR2, CLN3, CRB3 , DENND5A, ACE2, ANPEP, ATP9A, CNTNAP3, CDH17, ENPEP, SLC31A1, C3AR1, ALG2, SLC25A31, ATP11C, CLDN11, KCNIP3, ATP1A2, ACKR3, CD63, CLDND1, CERS6, CD300A, CYP20A1, GRAMD1A, ARRDC1, ADGRG6, ASIC5, B3GNT6, CEACAM6, TMEM30B, ACKR2, ANXA13, BBS1, CHST5, ARHGEF4, CMTM8, EPB41L3, ABHD12, AGPS, BCL2L13, CNPPD1, EBP, B3GNT7, HSD3B7, PAM, ALG14, CASD1, CHMP2B, CEACAM3, ABCD3, B3GAT1, CASQ1, HHLA2, CYP2C9, DIP2A, IBTK, ABCC5, SMPD4, HMOX1, SLC9A3R2, GRB14, MPZL1, NCEH1, LRFN5, MYZAP, NBAS, LHFPL2, MS4A18, GIPC1, MC4R, MS4A12, GFRA2, GLUL, MCUB, MTCH2, SLC2A10, SLC2A6, KIAA2013, NIPAL1, NIPAL4, APOOL, SLC16A10, IL17RA, LY9, GAL3ST1, GPA33, DPY19L1, HIGD1A, LZTR1, ALOX12, MUC13, NFXL1, HPS6, MYOC, MT-ND4, POMGNT1, ICA1, MFSD2A, NEU4, OR10R2, SLC16A7, MRC1, KLRC3, MUC4, PDLIM4, GPR63, IL4R, PSKH1,
   [0329] b. Tissue protected: Lung TGM2, AXL, SLC30A7, SLC30A4, SFT2D2, TMEM74B, EFNB3, CD300C, CHRM3, CHST11, ST3GAL6, SLC14A1, TRIM13, UBE2J1, ZGRF1, RNF144A, RNF145, SLC19A3, PIGS, BVES, AGER, PIGR, TJP3, SLC18A2, WHAMM, PTPRT, REEP2, RAP1GAP, PTPRG, MFSD10, SCARA3, NECAP1, MRGPRX2, OSBPL7, CD46, GPR183, MACF1, OBSCN, CD84, TMEM80, UBR4, PTPRB, TMEM201, PCDH1, RHOG, PSD4, SUSD6, RUFY3, SLC6A15, VTI1B, TMEM164, STEAP1, STK38L, PIK3R5, SIGLEC9, UBL3, ATG2B, CA2, CCR10, HLA-DRB1, EHD4, FPR1, SLC48A1, CD247, FCER1G, CYB5A, SLC44A2, DMXL2, ARL8A, ACSL5, CLCN5, AOC3, ECEL1, CLDN18, GNB5, TESC, EPHA4, HCLS1, CTNND1, DMTN, ARL8B, ELOVL1, ANKRD13A, CTXN2, GPR82, KCNMA1, AIFM2, LPAR6, EVA1B, GJA4, GALNT16, AP3M1, CLIC2, CXCR1, ANKRD13B, AQP1, ABCA8, AIG1, ANK2, ELMO2, AQP4, ENPEP, C3AR1, CACNA2D2, ACE, AP3S1, CD63, CLDND1, CYP20A1, AP3S2, CEACAM6, CMTM8, BDKRB2, CACNA1C, CADM1, ABCD3, CXCR3, CAVIN2, IBTK, GRB14, MPZL1, NCEH1, LAMP3, MC4R, GK, APOOL, GALNT13, HPS6, MFSD2A, SLC16A7, NSMF, SLC34A2, IL4R, PSKH1, LRRK2,
   [0330] c. Tissue protected: Skin TMEM243, TRDN, ZDHHC2, SFT2D2, SUN3, TMEM237, TMEM74B, CLEC10A, CD300C, CHRM3, ACER3, CHST11, GABARAPL2, MGAT4C, ST3GAL6, PERP, SLC47A1, SOX10, ALPL, SLC6A1, PITPNM1, SFXN5, TMEM97, RNF145, PARD3, ARHGAP5, NEGR1, NTM, NOXA1, TULP3, VPS26B, TCIRG1, PIGU, REEP2, RAP1GAP, GPIHBP1, MFSD10, LTBR, TMEM45A, SERP1, TYROBP, STYK1, ITGA9, MAPKAP1, SLC9A3, IFI27, NECAP1, PLIN2, ABCC3, GPR183, KCNAB1, LRRC55, LAX1, MACF1, MGST2, F2R, MERTK, LRRN2, SORD, DMPK, OBSCN, AATK, PNKD, SERP2, SELENOT, RMC1, VPS28, SLC7A7, YRDC, TMEM260, ZP2, VAC14, SYTL3, TMEM128, TBCD, UBR4, TNFRSF14, UGT2B15, TSC2, SLC28A3, S1PR5, PTAFR, SUSD6, TRPM4, VTI1B, TMEM164, SLC19A1, PRRT3, NAPB, SIGLEC9, TMEM171, TAS2R38, TRPC6, TMEM39B, ADCK2, CCR10, CHST3, CYBA, FFAR2, GPC4, DPY19L4, FPR1, CLEC16A, CYP2W1, DMXL2, ARL8A, CDH6, CLCN5, CYSLTR1, GLP2R, ANO7, FYN, FPR2, GPX8, FAR2, TESC, EPHA4, GPR84, ENOX2, ATRAID, CTNND1, DMTN, FAT2, FXYD6, ARL8B, CD99, CD248, ELOVL1, CAPNS2, ANKRD13A, CTXN2, DGKQ, GSDMA, FGFBP1, CTDNEP1, EVA1B, EDNRB, GJA4, GALNT16, AP3M1, FADS3, B3GNT4, ABCA8, ADGRF4, BRI3, KDELR3, ELOVL7, CD81, ANK2, SLC25A31, MS4A1, CLDND1, CAV3, CD1D, ASPRV1, ASIC5, TMEM63B, DSG3, TMEM30B, ACKR2, COL13A1, AGPS, BCL2L13, CLEC2A, CNPPD1, HSD3B7, PAM, ABCD3, IBTK, ABCC5, MPZL1, MYZAP, NBAS, GIPC1, MC4R, MCUB, SLC2A10, NIPAL1, NIPAL4, APOOL, HIGD1A, ALOX12, CHL1, POMGNT1, SLC2A11, MFSD2A, OR10R2, NCS1, IL4R, PSKH1, TMEM243, TCTN2, SLC30A7, SLC30A4, TECR, APLNR, CORO7, FIBCD1, TRIM13, UBE2J1, ULBP3, TNFRSF11A, TYR, PEMT, PDGFC, PIGS, RHOH, TPCN1, TJP3, WIPI2, DLC1, PLN, PTPRT, SEL1L3, SCARA3, RASA4, SLCO4A1, OSBPL7, CD46, ICAM3, DENND5B, SLC25A15, TMEM80, TMEM143, TMEM64, DCT, TSPAN31, PRNP, TMEM201, ZC4H2, SNTB1, MCUR1, PCDH1, RHOG, RUFY3, SERINC1, RAB31, TNFRSF10A, MTG2, PMEL, SEMA5B, ARHGAP27, TMEM219, TCTN3, CNTN3, FCER1A, GSDMC, EHD4, CYB5A, AIF1L, B3GNT5, TM7SF2, CYB561A3, FCGR2B, CNTFR, GLMP, FAM210A, ADGRE1, GPAT2, DNER, FGD2, SLC37A4, HRH1, IGSF11, CPTP, CXCR1, PROCR, BCL2, B3GNT8, UGCG, ELMO2, ATP9A, SLC31A1, AP3S1, CERS6, AP3S2, BBS1, CPNE2, CMTM8, ATG2A, BDKRB2, B3GNT7, CACNA1C, ALG14, ADGRA1, CHMP2B, CAVIN2, MPP2, HAS3, NCEH1, LHFPL2, MUC21, GFRA2, IL17RA, KIT, LZTR1, MT-ND4, PDLIM4, GPR63, ,
   [0331] d. Tissue protected: Liver VNN1, TRDN, AXL, SLC30A7, SFT2D2, TECR, TNFSF14, TTC17, MAP1LC3A, APLNR, CLEC10A, CD300C, CHRM3, ACY3, CHST11, FCAMR, GABARAPL2, ST3GAL6, SLC14A1, TRIM13, UBE2J1, ZGRF1, SLC47A1, PIM1, ALPL, SLC6A4, SNX24, NAAA, RNF144A, SLC25A40, SFXN5, SLCO1B3, SLCO1B1, RDX, PEMT, NDUFS8, NTRK3, SLC25A43, SLC27A5, SLC19A3, PARD3, NEGR1, PIGS, NOXA1, RHOH, PLEKHA3, TPCN1, TJP3, SLC18A2, PTPRD, KSR2, PTGDR2, LMAN2, PIGU, PTPRT, PDZK1, RDH16, LIN7A, SEL1L3, TMEM45A, SERP1, SCARA3, RASA4, SPPL3, ITGA9, MAPKAP1, SYNGR4, NECAP1, PLIN2, MRGPRX2, CD46, ABCB1, GPR183, LRRC55, NAT8, PNPLA3, MACF1, MGST2, MERTK, LRRN2, DENND5B, SORD, SLC25A15, OBSCN, AATK, MEGF8, PNKD, UGT2B4, SERP2, SELENOT, SLC3A1, TMEM132A, YIPF1, TFR2, TMEM260, VPS35L, ZDHHC8, UGT1A6, SYTL4, TMEM128, TMEM64, TNS2, TBCD, UBR4, TSPAN31, TNFRSF14, PTPRB, TMEM201, UGT2B15, TSC2, SLC25A25, ST7L, PCDH1, PTAFR, SUSD6, SLC39A14, SLC6A12, RUFY3, SERINC1, VTI1B, TMEM164, SLCO2B1, PPM1L, IMMT, NAPB, TSPAN2, TMEM219, SIGLEC9, TMEM171, VASN, CA2, CCR10, CDHR5, GGT1, JAM3, GSDMB, FKRP, FCER1A, GPC4, EVA1A, GHR, CX3CR1, DPY19L4, SLC48A1, CLEC16A, CYP2W1, CYP2D6, CYB5A, DMXL2, GJA5, ACSL5, CEACAM1, B3GNT5, CACNA1A, FYN, FPR2, GAS2, CADM4, FAR2, SLC2A2, CHDH, RASGRP2, HTR1A, TESC, CYP2A7, EPHA4, FOLH1, CYP1A2, CTNND1, DMTN, FXYD6, ARL8B, CNTFR, CYP3A4, FAM210A, CYP2A6, ELOVL1, CD1E, SLC37A4, FMO3, CYP4V2, CTXN2, DEPDC5, KCNMA1, GPRC5B, ABCB4, NINJ1, CYP2C8, DHCR24, CDH2, CTDNEP1, EVA1B, GPAM, KMO, GJA4, HSD17B2, GALNT16, MAL2, MAN1C1, AP3M1, CYP2C19, FADS3, AQP9, ABCA8, AIG1, BRI3, UGCG, AP1S2, CDHR2, CRB3, ANPEP, ENPEP, ASGR1, SLC31A1, ADRA2B, ABCB11, ATP1A2, CMKLR1, CYP2A13, ACKR3, CD63, CLDND1, CYP20A1, CYP2E1, GRAMD1A, CTSL, ARRDC1, ASIC5, TMEM63B, ACAD11, TMEM30B, BBS1, CMTM8, EPB41L5, HSD11B1, AGPS, BACE2, CD320, CYTH2, EBP, ASGR2, ATG2A, PIK3AP1, CYP3A43, HSD3B7, CHMP2B, ABCD3, B3GAT1, CASQ1, INTS2, CAVIN2, CYP2C9, IBTK, SMPD4, MOXD1, SLC9A3R2, GRB14, MPZL1, MYZAP, NBAS, LHFPL2, MFAP3L, GIPC1, LIMS2, GLUL, MTCH2, GPR15, GK, SLC2A6, NIPAL1, NIPAL4, APOOL, IL17RA, DPY19L1, SLC2A8, HIGD1A, LZTR1, ALOX12, HPS6, POMGNT1, SLC2A11, ICA 1, MFSD2A, OR10R2, ABCC2, PDLIM4, GPR63, PSKH1, LRRK2, SLC10A1, NPC1L1,
   [0332] e. Tissue protected: Kidney (glomeruli) AXL, SLC30A7, SFT2D2, TECR, ZAP70, CORO7, ACER3, CHST11, MGAT4C, ST3GAL6, SLC14A1, UBE2J1, SLC47A1, MAPT, SLC45A1, RNF144A, SFXN5, PEMT, RNF145, SLC19A3, PDGFC, PLPP1, PLEKHA3, WHAMM, KSR2, PARVB, PTPRT, RAP1GAP, PTPRG, MRGPRF, SEL1L3, SERP1, SCARA3, TPSG1, PECAM1, PTGDR, ADCYAP1R1, NECAP1, PLA2R1, CD46, PTH2R, KCNAB1, LRRC55, PNPLA3, MACF1, F2R, MGAT4A, MAP6, NOS3, DENND5B, NPHS2, SERP2, RMC1, VPS28, VPS35L, VAC14, TSPAN7, TNS2, STK10, PCDH1, PTAFR, PSD4, SUSD6, SLC6A12, RAB31, TRPM4, VTI1B, TNFRSF10A, TMEM164, STK38L, THSD7A, PITPNM3, PTPRO, SREBF1, SLC35B1, RTL1, NAPB, TMEM171, VASN, PRKCZ, JAM3, EVA1A, HYAL2, CX3CR1, EHD4, DMXL2, AIF1L, CDH6, CEACAM1, FYN, GAS2, CD93, FAM107A, GNB5, ADGRF1, CD34, RASGRP2, HTR1A, CTNND1, DMTN, ENG, CD99, CD248, DOCK5, FAM210A, ADGRE1, CR1, FGD2, HRH1, GPR82, KCNMA1, GPRC5B, EVA1B, MAS1, GJA4, GALNT16, ADGRL4, CLIC2, FADS3, ANO8, AQP1, CLN3, CRB3, ACKR1, ELMO2, ENPEP, CHRM1, CLDND1, CERS6, CYP20A1, EPB41L5, CACNA1C, PAM, BBS7, B3GAT1, SLC9A3R2, GRB14, HAS3, MPZL1, NBAS, GIPC1, LIMS2, ITGA8, MLIP, NIPAL4, LZTR1, NFXL1, HPS6, MFSD2A, NEU4, SLC16A7, DYSF, PSKH1, PDGFRA,
   [0333] f. Tissue protected: Kidney (tubules) TMEM231, TMEM243, VNN1, TRDN, AXL, ZDHHC2, SLC30A7, SFT2D2, SUN3, TRPM3, TECR, TMEM237, TBC1D3G, TMEM74B, TREH, TNFSF14, TTC17, APLNR, ATP8B2, CORO7, CHRM3, ACER3, ACY3, CHST11, FIBCD1, FCAMR, GABARAPL2, MGAT4C, ST3GAL6, THY1, SLC14A1, UBE2J1, ZGRF1, SLC47A1, MAPT, TMEM240, PIM1, ALPL, SLC6A4, SMIM24, SLC5A12, SLC5A2, STIMATE, SLC12A1, NAAA, PCDHB2, PITPNM1, RNF144A, SLC25A40, AHCYL1, SFXN5, SLC4A10, SCNN1D, PEX1, RDX, PEMT, SLC6A19, SLC22A11, S1PR2, NDUFS8, SLC34A3, NTRK3, NAV3, SLC19A3, PARD3, ARHGAP5, SLC28A2, RHOF, RDH11, NEGR1, PTH1R, PDGFC, PIGS, PLPP1, NOXA1, AGER, RHOH, PIGR, TPCN1, TULP3, TJP3, VPS26B, WSCD1, WIPI2, TCIRG1, WHAMM, PTPRD, PARVB, RHBDD2, DLC1, PCDHA4, LMAN2, PDE9A, PIGU, PTPRT, RALB, RAP1GAP, PDZK1, PSCA, LIN7A, MRGPRF, SEL1L3, LTBR, TMEM45A, UCHL1, SERP1, SCARA3, TRPM7, RASA4, SLCO4A1, SPPL3, STYK1, ITGA9, MAPKAP1, SLC9A3, IFI27, PTGDR, AD CYAP1R1, NECAP1, PLIN2, NOS1, PEX10, ABCC3, OSBPL7, CD46, ABCB1, GPR183, KCNAB1, LRRC55, NAT8, PNPLA3, SLC24A3, PLCD4, MACF1, MGST2, MGAT4A, MERTK, ITPR1, LRRN2, CNEP1R1, NTRK2, DENND5B, SORD, SLC25A15, OBSCN, AATK, MEGF8, NKAIN4, PNKD, RFTN2, UGT2B4, ATP6V1D, SLC22A6, SERP2, TMEM72, TNFAIP8L3, SELENOT, UGT3A1, XPNPEP2, SLC3A1, TMEM132A, VSIG10, YIPF1, VPS28, ATP6V0A4, SLC7A7, TMEM80, TMEM260, VPS35L, ZDHHC8, ZP2, VAC14, UGT1A6, SYTL4, TMEM252, SYTL3, TMEM128, TMEM174, TMEM64, TBCD, UBR4, TSPAN31, TMEM41A, TSPAN8, TNFRSF14, PLAUR, PTPRB, SYTL2, TMEM201, TMPRSS2, SLC46A2, TSC2, SLC28A1, SEMA6B, SNTB1, SIRT2, MCUR1, SLC22A2, PCDH1, RHOG, SLC28A3, SCAMP5, PTAFR, SLC22A8, SLC13A3, SUSD6, PIGZ, SLC39A14, SLC6A12, RUFY3, RAB31, SLC6A18, SLC13A2, TMEM213, TRPM4, VTI1B, TNFRSF10A, TMEM164, SLC5A1, STK38L, MTG2, TMEM184A, SLC4A4, SLC25A23, SEC11C, TMEM178B, SREBF1, PIK3R5, PKHD1, PRRT3, IMMT, SLC35G2, OPRD1, NAPB, TSPAN2, TMEM219, TMEM171, VASN, TAS2R38, TSPAN16, UBL3, TMEM39B, ADCK2, ATG2B, CA2, CCR10, CDHR 5, CHST3, ENPP6, EMC4, PRKCZ, GGT1, JAM3, IYD, DPEP1, ENPP3, CUBN, CLSTN2, GSDMB, DLK1, FKRP, FCER1A, GPC4, EVA1A, GHR, HYAL2, GSDMC, KIRREL2, CX3CR1, DPY19L4, EHD4, SLC48A1, CLEC16A, FCER1G, CKMT2, CPNE6, CYB5A, JAKMIP1, CLTRN, SLC44A2, DMXL2, AIF1L, ARL8A, GJA5, ACSL5, CDH6, CLCN5, FAM151A, B3GNT5, GAS2, CADM4, FAR2, FAM107A, FNDC5, SLC2A2, CHDH, DOCK2, GNB5, CLCNKB, HTR1A, ADGRG5, TESC, CLCNKA, CLN6, EPHA4, ENOX2, FAM169A, TM7SF2, ATRAID, CASR, FOLH1, CTNND1, DMTN, FXYD6, ARL8B, CNTFR, CD248, CLIC4, FAM210A, ADGRE1, ELOVL1, FRRS1L, ANKRD13A, CA4, CD1E, SLC37A4, FMO3, CYP4V2, CTXN2, DEPDC5, HRH1, GNG11, GLIPR1L2, LPXN, DGKQ, GPR82, KIAA0319, KCNMA1, GPRC5B, IGSF11, DHCR24, LPAR6, CDH2, CTDNEP1, KMO, EDNRB, LRFN4, CPTP, GJA4, GALNT16, MAL2, MAGI1, FPGS, MAN1C1, AP3M1, EPHB1, FADS3, ABHD16A, BSND, CXCR1, ANO8, AQP6, AQP1, ABCA8, AIG1, BRI3, CDC42EP5, NPR3, BCL2, MPP1, HTR4, UGCG, AP1S2, CDC42SE1, CDHR2, CRB3, ANK2, DENND5A, ANPEP, ATP9A, ENPEP, SLC7A9, CLDN10, DUSP15, SLC31A1, ALG2, SLC25A31, ATP11C, FXYD2, ACE, AP3S1, CATIP, CMKLR1, ACKR3, CD63, CLDND1, CLDN2, CERS6, CAV3, CYP20A1, CPT1B, GRAMD1A, CTSL, ARRDC1, ASIC5, AP3S2, TMEM63B, ACKR2, ANXA13, BBS1, COL13A1, CPNE2, ARHGEF4, CMTM8, EPB41L3, EPB41L5, AGPS, EBP, PIK3AP1, CACNA1C, CYP3A43, HSD3B7, CDH16, CHMP2B, CADM1, ABCD3, B3GAT1, CASQ1, INTS2, DIP2A, IBTK, MPP2, ABCC5, SMPD4, HMOX1, LRFN2, MOXD1, GRB14, HAS3, MPZL1, NCEH1, MYZAP, NBAS, LHFPL2, KCNJ10, KCNJ12, MFAP3L, GIPC1, MC4R, GFRA2, KCNK5, MCUB, MTCH2, SLC2A10, GK, MS4A4A, MLIP, SLC2A6, KIAA2013, NIPAL1, NIPAL4, APOOL, SLC16A10, IL17RA, FMO1, GAL3ST1, DPY19L1, HIGD1A, LRP2, LZTR1, ALOX12, NFXL1, HPS6, MYOC, MT-ND4, MFSD1, CHL1, POMGNT1, SLC2A11, ICA1, IL23R, MFSD2A, OR10R2, SLC16A7, MRC1, GRIN2D, NSMF, ABCC2, KCTD8, PDLIM4, DYSF, GPR63, IL4R, PSKH1, LRRK2, NPC1L1,
   [0334] g. Tissue protected: Heart (cardiomyocytes) TGM2, AXL, TCTN2, SLC30A7, SLC30A4, SLC27A6, SPAG4, TECR, TMEM237, TMEM74B, TNFSF14, TTC17, EFNB3, APLNR, ATP8B2, CAP2, CD300C, CHST11, FIBCD1, GABARAPL2, MGAT4C, SLC46A1, RASL10B, ST3GAL6, SLC14A1, TMEM106B, SLC47A1, MAPT, SNX24, NAAA, PITPNM1, RNF144A, SFXN5, SLC4A10, PEX1, SGCB, PEMT, NDUFS8, NTRK3, RNF145, SLC19A3, NEGR1, PIGS, BVES, RHOH, PLEKHA3, TPCN1, TJP3, VPS26B, WSCD1, TCIRG1, WHAMM, PTPRD, PARVB, POPDC2, P2RY6, PDE9A, PLCH2, PLN, RAP1GAP, GPIHBP1, MFSD10, MRGPRF, SEL1L3, SERP1, SCARA3, SHISA4, INPP5D, RASA4, SGCG, SLCO4A1, SRL, MAPKAP1, SLC9A3, ABCC3, OSBPL7, CD46, GPR183, LRRC55, ART3, SLC24A3, KLHL41, MACF1, MGST2, MGAT4A, MERTK, ITPR1, LRRN2, CNEP1R1, DENND5B, DMPK, SLC25A15, OBSCN, AATK, MEGF8, PNKD, RFTN2, SERP2, SIPA1, SELENOT, TMEM132A, YIPF1, TMEM236, SLC7A7, YRDC, TMEM143, TREML1, VPS35L, ZP2, VAC14, TMEM64, TBCD, UBR4, TSPAN31, TMEM41A, TNFRSF14, PTPRB, TMEM201, ZC4H2, TSC2, SEMA6B, SLC25A25, SNTB1, SIRT2, PCDH1, SCAMP5, PTAFR, RAB27A, RAB11FIP4, SUSD6, PIGZ, SLC39A14, SLC6A12, RYR1, SLAMF8, RUFY3, SERINC1, RAB31, TRPM4, VTI1B, TNFRSF10A, TMEM164, SLCO2B1, STK38L, MTG2, PPM1L, SLC25A23, TMEM178B, SEMA5B, ST8SIA2, IMMT, SLC35B1, SLC35G2, NAPB, TMEM219, TMEM171, VASN, TAS2R38, TCTN3, TRPC6, UBL3, TMEM39B, ATG2B, CCR10, JAM3, CNTN3, GSDMB, FKRP, FCER1A, GPC4, EVA1A, MMP27, CX3CR1, DPY19L4, EHD4, FPR1, CLEC16A, CKMT2, CYP2W1, GOLPH3, DMXL2, ABCG2, CDH6, CDH15, ADRA1A, B3GNT5, CADM4, GPX8, FAR2, FNDC5, CHDH, GNB5, ADGRF1, RASGRP2, HTR1A, CAVIN4, CLN6, SLC2A4, EPHA4, GPR84, TM7SF2, HHATL, CYB561A3, CTNND1, FCGR2B, FLNC, FXYD6, CHRNA1, ARL8B, CNTFR, CD248, ELOVL1, GPAT2, FGD2, ANKRD13A, CD1E, SLC37A4, CYP4V2, DEPDC5, HRH1, DGKQ, GPR82, CAMK2B, GPRC5B, IGSF11, CDH2, CTDNEP1, EVA1B, MBOAT7, CPTP, GJA4, GALNT 16, LEPROTL1, MAN1C1, ADGRL4, AP3M1, CLIC2, FADS3, ABHD16A, CXCR1, FCGRT, ANO8, ANKRD13B, B3GNT4, AIG1, B3GNT8, UGCG, ELOVL7, AP1S2, CDC42SE1, CD81, CDHR2, CLN3, ANK2, DENND5A, CNTNAP3, SLC31A1, CSF3R, C3AR1, ALG2, SLC25A31, ATP11C, AP3S1, ATP1A2, CMKLR1, ACKR3, CD63, CLDND1, CAV3, CD300A, CPT1B, CD1D, ARRDC1, AKAP6, ADGRG6, ADRB1, ASIC5, AP3S2, ACAD11, TMEM30B, BBS1, COL13A1, CPNE2, ARHGEF4, CMTM8, BCL2L13, BACE2, CNPPD1, CACNA1C, HSD3B7, PAM, ABCD3, CASQ1, IBTK, ABCC5, SMPD4, GRB14, MPZL1, NCEH1, MYZAP, NBAS, LHFPL2, MFAP3L, NCAM1, GIPC1, GPR182, LIMS2, MC4R, KCNK5, MCUB, MTCH2, SLC2A10, GPR15, GK, MLIP, NIPAL4, APOOL, SLC16A10, GAL3ST1, DPY19L1, SLC2A8, HIGD1A, IL18RAP, LZTR1, ALOX12, NFXL1, MT-ND4, POMGNT1, ICA1, OR10R2, MCEMP1, PDLIM4, DES, DYSF, GPR63, IL4R, PSKH1, LRRK2,
   [0335] h. Tissue protected: Thyroid TCTN2, SLC30A7, SLC30A4, SLC27A6, SFT2D2, TECR, TMEM237, TMEM74B, TNFSF14, TTC17, APLNR, ATP8B2, CHRM3, CHST11, FIBCD1, GABARAPL2, SLC46A1, ST3GAL6, TMEM100, TMEM106B, TRIM13, UBE2J1, ZGRF1, VPS33B, SLC47A1, TMEM251, PIM1, ALPL, SLITRK4, SNX24, SRI, TNFRSF11A, NAAA, PCDHB2, RNF144A, AHCYL1, SFXN5, SCNN1D, PEX1, RDX, PEMT, NDUFS8, NTRK3, RNF145, SLC19A3, PARD3, ARHGAP5, NEGR1, KCNQ5, PIGS, NOXA1, BVES, TPO, PLEKHA3, TPCN1, TULP3, TJP3, VPS26B, WSCD1, WIPI2, TCIRG1, WHAMM, RHBDD2, LMAN2, PIGU, RAP1GAP, GPIHBP1, LIN7A, SEL1L3, SERP1, SCARA3, INPP5D, SLCO4A1, MAPKAP1, IFI27, NMUR2, ABCC3, OSBPL7, CD46, GPR183, KCNAB1, PSD3, LRRC55, SLC24A3, MACF1, MGAT4A, LRRN2, CNEP1R1, NTRK2, DENND5B, SORD, SLC25A15, OBSCN, AATK, MEGF8, PORCN, PNKD, SERP2, SELENOT, YIPF1, VPS28, SLC7A7, YRDC, TMEM80, TMEM260, VPS35L, ZDHHC8, VAC14, SYTL4, SYTL3, TMEM128, TBCD, UBR4, TSPAN31, TMEM41A, TNFRSF14, TNFRSF10C, ZC4H2, TSC2, RTP5, SLC25A25, MCUR1, PCDH1, PTAFR, SLC26A4, SUSD6, SLC39A14, RUFY3, SERINC1, RAB31, VTI1B, TNFRSF10A, TMEM164, RNFT2, SLCO2B1, STK38L, MTG2, PPM1L, SLC25A23, SREBF1, PIK3R5, PRRT3, IMMT, SYN3, TMEM219, SIGLEC9, TMEM171, TCTN3, UBL3, TMEM39B, ADCK2, C19orf18, CCR10, CHST3, PRKCZ, JAM3, IYD, CNTN3, DUOX1, FCER1A, GPC4, EVA1A, GHR, CX3CR1, DPY19L4, EHD4, SLC48A1, CLEC16A, FCER1G, CYP2W1, GOLPH3, DMXL2, ABCG2, AIF1L, ARL8A, CDH6, B3GNT5, FYN, FPR2, CADM4, GPX8, FAR2, GNB5, CLCNKB, RASGRP2, HTR1A, TESC, CLCNKA, CLN6, EPHA4, ATRAID, CTNND1, DMTN, FCGR2B, FXYD6, ARL8B, CD99, CNTFR, GLMP, FAM210A, ADGRE1, ELOVL1, GPAT2, FGD2, ANKRD13A, CD1E, FMO3, IPCEF1, CTXN2, DEPDC5, DPP10, LPXN, DGKQ, CAMK2B, KCNMA1, IGSF11, LPAR6, CDH2, CTDNEP1, EVA1B, GJA4, GALNT16, MAGI1, ADGRL4, AP3M1, CLIC2, EPHB1, CXCR1, FER1L6, ANO8, ANKRD13B, PROCR, BCL2 , UGCG, CRB3, ANK2, DENND5A, ELMO2, AAK1, ATP9A, AQP4, ENPEP, C3AR1, ALG2, CMKLR1, CRHR1, ACKR3, CD63, CLDND1, CERS6, CD300A, CYP20A1, ARRDC1, TMEM63B, TMEM30B, ACKR2, BBS1, COL13A1, CPNE2, ARHGEF4, CMTM8, AGPS, CD320, CYTH2, CACNA1C, HSD3B7, CDH16, CDH10, CHMP2B, CEACAM3, CADM1, ABCD3, ARFGAP3, INTS2, CAVIN2, IBTK, MPP2, SMPD4, MPZL1, NCEH1, MYZAP, NBAS, LHFPL2, LRP1B, NCAM1, GIPC1, MC4R, GFRA2, GLUL, KCNK5, SLC2A10, GPR15, GK, SLC2A6, NIPAL4, APOOL, IL17RA, GAL3ST1, LZTR1, HPS6, MT-ND4, MFSD1, POMGNT1, SLC2A11, ICA1, MFSD2A, OR10R2, GRIN2D, NCS1, PDLIM4, GPR63, PSKH1,
   [0336] i. Tissue protected: Pancreatic endocrine cells (Islets) ZDHHC2, SLC30A4, SFT2D2, TNFSF14, TTC17, MAP1LC3A, CHRM3, ACER3, CHST11, FIBCD1, SCGN, UBE2J1, MAPT, PIM1, ALPL, STX1A, NAAA, RAB3A, PITPNM1, RNF144A, AHCYL1, RTN1, PEMT, NDUFS8, RNF145, SCG3, PARD3, ARHGAP5, NEGR1, PIGS, NOXA1, POMGNT2, TPCN1, TJP3, WSCD1, WIPI2, PTGDR2, PDE9A, PTPRT, RAP1GAP, RAB3B, UCHL1, SERP1, SCARA3, SPPL3, MAPKAP1, PTPRN, ABCC3, CD46, PTH2R, GPR183, LRRC55, MGST2, MGAT4A, LRRN2, CNEP1R1, OBSCN, AATK, NECAB2, PNKD, SLC17A6, ATP6V1D, SERP2, SHISAL2B, SV2A, YRDC, ZDHHC8, VAC14, SYTL4, TSPAN7, TMEM64, TNS2, UBR4, TSPAN31, TNFRSF14, PLAUR, SLC30A8, PRNP, TSC2, SLC25A25, STK10, PCDH1, SCAMP5, RAB27A, SYP, PTPRN2, RUFY3, RAB31, TRPM4, VTI1B, SLCO2B1, PPM1L, MAPK10, PRRT3, IMMT, SLC35G2, OPRD1, NAPB, TSPAN2, TMEM219, SIGLEC9, VASN, TMEM39B, ATG2B, CCR10, EMC4, PRKCZ, JAM3, DLK1, FFAR2, GPC4, DGCR2, CLEC16A, CYP2W1, GOLPH3, CLTRN, DMXL2, CDH6, CLCN5, B3GNT5, FAR2, GNB5, GNAO1, TESC, FAM169A, CASR, CTNND1, FXYD6, ARL8B, AQP8, CD99, CNTFR, ELOVL1, ANKRD13A, CYP4V2, DGKQ, IGSF11, LPAR6, CDH2, CTDNEP1, GJA4, MAGI1, CXCR1, UGCG, CD81, ENO2, ELMO2, ATP9A, CLU, C3AR1, ALG2, FXYD2, AMPH, ATP1A2, CRHR1, ACKR3, CD63, CLDND1, CYP20A1, CD1D, ARRDC1, ASIC5, TMEM30B, BBS1, ARHGEF4, EPB41L3, EPB41L5, CYTH2, PAM, BBS7, CADM1, GAD2, ABCD3, ARFGAP3, ALOX5, IBTK, MPP2, ABCC5, SMPD4, MPZL1, NBAS, GIPC1, MC4R, GFRA2, GLUL, MTCH2, SLC2A10, KIAA2013, APOOL, FMO1, GAL3ST1, HPS6, MT-ND4, ICA1, OR10R2, PDLIM4, PSKH1,
   [0337] j. Tissue protected: Pancreatic exocrine cells AXL, TCTN2, ZDHHC2, SLC30A7, SFT2D2, TMEM237, TNFSF14, ATP8B2, CLEC10A, CD300C, CORO7, CHRM3, CHST11, FIBCD1, GABARAPL2, SLC46A1, RASL10B, ST3GAL6, TBC1D3D, TMEM100, UBE2J1, ZGRF1, PIM1, ALPL, STIMATE, NAAA, AHCYL1, SFXN5, SLC4A10, PEX1, RDX, PEMT, TMEM97, NTRK3, RNF145, SLC19A3, PARD3, PDGFC, PIGS, PLPP1, NOXA1, POMGNT2, RHOH, PLEKHA3, TJP3, VPS26B, WSCD1, TCIRG1, WHAMM, PCDHA4, LMAN2, PDE9A, PIGU, PTPRT, RAP1GAP, PSCA, MFSD10, MRGPRF, SEL1L3, SERP1, SCARA3, SLCO4A1, STYK1, ITGA9, IFI27, MRGPRX2, ABCC3, CD46, PTH2R, GPR183, KCNAB1, LRRC55, SLC24A3, MACF1, MGST2, MGAT4A, MERTK, LRRN2, CNEP1R1, DENND5B, SORD, OBSCN, AATK, MEGF8, PNKD, ATP6V1D, SERP2, TMEM72, TNFAIP8L3, SELENOT, UGT3A1, SLC3A1, VSIG10, YRDC, TMEM80, ZDHHC8, VAC14, SYTL4, UNC13D, TMEM128, TSPAN31, TMEM41A, TSPAN8, PLAUR, TBC1D3E, PTPRB, SYTL2, TMEM201, TMPRSS2, TNFRSF10C, ZC4H2, SNTB1, PCDH1, SYCN, SLC28A3, SCAMP5, RAB27A, SUSD6, SLC39A14, RUFY3, SERINC1, RAB31, VTI1B, SLCO2B1, MTG2, SLC4A4, SLC25A23, SEC11C, SLC19A1, TMEM178B, PKHD1, IMMT, ARHGAP27, NAPB, TMEM219, TAS2R38, TCTN3, TMEM39B, ADCK2, CA2, CHST3, PRKCZ, GGT1, DPEP1, CUZD1, GPC4, EVA1A, GHR, GP2, SLC2A12, KIRREL2, DPY19L4, SLC48A1, CLEC16A, FCER1G, CYB5A, GOLPH3, DMXL2, ARL8A, ACSL5, CDH6, CYSLTR1, B3GNT5, CYSTM1, FPR2, FAR2, CHDH, ADGRF1, RASGRP2, TESC, CLN6, CTNND1, FCGR2B, FXYD6, A RL8B, AQP8, CNTFR, CD248, FAM210A, ELOVL1, GPAT2, FGD2, ANKRD13A, CA4, SLC37A4, FMO3, CYP4V2, DGKQ, GPR82, GPRC5B, IGSF11, LPAR6, CTDNEP1, EVA1B, GJA4, GALNT16, MAGI1, FPGS, LEPROTL1, MAN1C1, AP3M1, FADS3, AQP1, BRI3, BCL2, HTR4, KDELR3, CDH9, ELOVL7, AP1S2, CDC42SE1, CD81, CLN3, CRB3, DENND5A, ACE2, ANPEP, CNTNAP3, CFTR, CLDN10, ALG2, SLC25A31, ATP11C, FXYD2, CMKLR1, ACKR3, CD63, CLDND1, AQP5, CD300A, CYP20A1, CTSL, ARRDC1, TMEM30B, CHST4, COL13A1, CMTM8, AGPS, CYTH2, PIK3AP1, B3GNT7, HSD3B7, ALG14, BBS7, CHMP2B, CADM1, ABCD3, ARFGAP3, CASQ1, AQP12A, AQP12B, CAVIN2, IBTK, MPP2, SMPD4, MOXD1, GRB14, MPZL1, NCEH1, LRFN5, MYZAP, NBAS, NCAM1, GIPC1, MC4R, GFRA2, MCUB, MTCH2, SLC2A10, SLC2A6, KIAA2013, APOOL, SLC16A10, IL17RA, GAL3ST1, NFXL1, HPS6, MYOC, MT-ND4, POMGNT1, SLC2A11, ICA1, MFSD2A, OR10R2, SLC16A7, PDLIM4, PSKH1, LRRK2,
[0338] 6. Cancer treated: colorectal cancer
   [0339] a. Tissue protected: Colon TMEM138, CD36, SCGN, ST3GAL6, UBE2J1, SNTG2, SYT13, PIM1, ALPL, STX1A, TMEM263, ENPP1, PITPNM1, SLC27A2, SOCS7, SEMA5A, SLC26A1, BVES, WHAMM, PTPRD, RAB27B, ITGB1, KLRG1, DLC1, PCDHA4, RECK, RAB3B, PSCA, KCNH8, MRGPRF, ADIPOR2, TRPM7, UPK3BL2, SLC18A1, MAPKAP1, ITLN1, SYNGR4, TAOK2, LRRC55, OBSCN, UGT2B4, SLC26A3, TMEM72, TMEM132A, SYT11, SLC7A7, TUB, ZP2, QTRT1, TMEM128, TMEM253, PLAUR, PRRG2, UPK3BL1, SEZ6, SCAMP5, SYP, SLC39A2, SLC6A12, RUFY3, SLC23A1, SLC35B1, PNLDC1, ARHGAP27, TMEM171, CA2, EFHD1, FKRP, IL9R, ABCG1, ABCG2, AIF1L, GPC5, CD177, GLP2R, B3GNT5, DCBLD1, EPHA4, GATM, ADGRA3, GJA1, CHODL, IGSF11, LRRC37B, HSD17B2, CDC42EP5, ANKFY1, SH3BP5, ANPEP, CNTNAP3, CLDN11, KCNIP3, CADPS, BIK, ARRDC1, DCXR, ACKR2, CMTM8, EPB41L3, COL6A2, CNPPD1, CASD1, B3GAT1, CYP2C9, DIP2A, HMOX1, S LC9A3R2, LRFN5, MYZAP, KCNN3, MS4A18, NDUFS1, MS4A12, GFRA2, IGFLR1, LZTR1, ALOX12, OR10R2, MRC1, KLRC3,
   [0340] b. Tissue protected: Lung SLC30A4, EFNB3, CD300C, CHRM3, ST3GAL6, TRIM13, UBE2J1, VIPR2, SLC22A15, TRPV4, SLC25A17, TGFBR3, RNF144A, SEMA4F, SLC26A1, NUS1, BVES, AGER, TMEM43, SLC18A2, WHAMM, RECK, REEP2, PTPRG, KIRREL3, EHD2, OBSCN, CD84, TMEM80, QTRT1, PTPRB, PRRG2, TMEM255B, P2RY2, SEZ6, RHOG, PSD4, SLC39A2, RUFY3, STEAP1, RYK, PNLDC1, CA2, EHD1, GJB4, EHD4, CD247, CCR7, CYB5A, ABCG1, CAVIN1, GPC5, AOC3, CDH11, DCBLD1, EPHA4, EPHX1, HCLS1, GJA1, CCDC88A, FES, CLIC2, DGKZ, ABCA8, AIG1, APBB1IP, ANKFY1, FCAR, ELMO2, CAV1, AQP4, CYB561D1, CACNA2D2, ACE, ANXA1, CMTM8, COL6A2, CAVIN2, LAMP3, EHD3, GK, SLC34A2, LRRK2,
   [0341] c. Tissue protected: Skin TMEM243, SUN3, TMEM138, CLEC10A, CD300C, CHRM3, ACER3, ST3GAL6, VIPR2, SOX10, SNTG2, TRPV4, SLC25A17, TGFBR3, ALPL, TMEM263, ENPP1, TMPRSS11D, SLC6A1, PITPNM1, TMEM97, SEMA5A, SLC26A1, NEGR1, NUS1, SLC26A9, TMEM43, RAB27B, MTMR2, REEP2, KCNH8, GPIHBP1, ADIPOR2, LTBR, TYROBP, MAPKAP1, TAOK2, LANCL2, LRRC55, LYPD3, KRT1, F2R, PLA2G4E, DMPK, OBSCN, RMC1, TMEM79, SLC7A7, TUB, YRDC, ZP2, TMEM128, THBD, PRRG2, TMEM255B, P2RY2, SLC39A2, NGFR, RYK, SLC19A1, PNLDC1, RIPK4, TMEM171, CLCA2, COL17A1, GJB4, FFAR2, FA2H, ABCG1, CAVIN1, GPC5, CDH6, CD177, GLP2R, ANO7, CDH11, DCBLD1, GPX8, EPHA4, GATM, ATRAID, FAT2, ADGRA3, CD99, CD248, GJA1, CAPNS2, GSDMA, LRRC37B, B3GNT4, DSG1, ABCA8, ADGRF4, ANKFY1, CD81, BST1, CAV1, CCR2, MS4A1, BIK, CD1D, ANXA1, ASPRV1, TMEM63B, DSG3, DCXR, ACKR2, CNPPD1, ATP12A, MYZAP, TACR1, ALOX12, CHL1, SLC2A11, OR10R2, NCS1, TMEM243, TCTN2, SLC30A4, ZDHHC6, TRIM13, UBE2J1, SYT13, ULBP3, TYR, RHBG, DLC1, PLN, KCNQ4, SLC25A15, TMEM80, QTRT1, DCT, PRNP, RHCG, SH2D3C, RHOG, RUFY3, PMEL, ARHGAP27, EHD1, GSDMC, EHD4, IGSF3, CYB5A, AIF1L, B3GNT5, ABHD17C, CYB561A3, FCGR2B, FAM210A, GPAT2, CD82, DNER, FGD2, IGSF11, DGKZ, BASP1, ELMO2, CYB561D1, CDH13, CMTM8, ADGRA1, CAVIN2, MPP2, MUC21, NDUFS1, GFRA2, EHD3, KIT, LZTR1, KIAA0040, ,
   [0342] d. Tissue protected: Liver SLC13A5, TMEM138, CLEC10A, CD300C, CHRM3, ST3GAL6, TRIM13, UBE2J1, SYT13, SLC25A17, PIM1, ALPL, SLC6A4, ENPP1, SYNE3, RNF144A, SLC25A40, SLC27A2, SLCO1B3, SLCO1B1, SEMA4F, SLC27A5, SEMA5A, SLC26A1, NEGR1, SLC18A2, PTPRD, RAB27B, KSR2, MTMR2, PTGDR2, RECK, RDH16, LIN7A, KCNQ4, MAPKAP1, SYNGR4, TAOK2, LRRC55, NAT8, KIRREL3, SLC25A15, OBSCN, UGT2B4, TMEM132A, YIPF1, TFR2, TUB, TMEM128, TNS2, ZDHHC13, PTPRB, ST7L, SLC39A2, SLC6A12, RUFY3, SLCO2B1, TEX261, TSPAN2, TMEM171, CA2, FKRP, EVA1A, GPR37, CYP2D6, CYB5A, ABCG1, GJA5, CD177, B3GNT5, CACNA1A, GAS2, SLC2A2, CREB3L2, CYP2A7, EPHA4, GATM, EPHX1, FOLH1, CYP1A2, ADGRA3, CYP3A4, FAM210A, CYP2A6, CYP2B6, FMO3, GPRC5B, NINJ1, CYP2C8, LRRC37B, CDH2, FES, KMO, HSD17B2, MAL2, CYP2C19, BCL2L10, AQP9, ABCA8, AIG1, ANKFY1, ANPEP, ASGR1, CYB561D1, ADRA2B, ABCB11, CYP2A13, CTSL, ARRDC1, TMEM63B, DCXR, CMTM8, BACE2, ASGR2, PIK3AP1, B3GAT1, CAVIN2, CYP2C9, SLC9A3R2, MADCAM1, MYZAP, MFAP3L, LIMS2, NDUFS1, GPR15, GK, IGFLR1, SLC2A8, LZTR1, ALOX12, SLC2A11, OR10R2, LRRK2, GAA, NPC1L1,
   [0343] e. Tissue protected: Kidney (glomeruli) ZDHHC16, TMEM138, ZDHHC6, ACER3, ST3GAL6, UBE2J1, VIPR2, KDR, S LC22A15, MAPT, SYT13, TRPV4, SLC25A17, TGFBR3, SYNE3, SLC45A1, RNF144A, PODXL, KIRREL1, TMEM43, WHAMM, ITGB1, KSR2, RECK, PTPRG, MRGPRF, PECAM1, SCUBE1, PLA2R1, PTH2R, LRRC55, F2R, KIRREL3, EHD2, NKD1, NPHS2, RMC1, TUB, TSPAN7, TNS2, PRRG2, TMEM255B, SNCA, PSD4, SLC6A12, THSD7A, RYK, PITPNM3, PTPRO, SLC35B1, RTL1, TMEM171, EFHD1, EHD1, EVA1A, EHD4, AIF1L, CAVIN1, GPC5, CDH6, CDH11, DCBLD1, GAS2, CD93, FAM107A, CD34, ENG, CD99, CD248, GJA1, DOCK5, FAM210A, CR1, FGD2, GPRC5B, MAS1, ADGRL4, CLIC2, ANKFY1, ELMO2, CAV1, CHRM1, BIK, CDH13, ANXA1, COL6A2, BBS7, B3GAT1, SLC9A3R2, LIMS2, ITGA8, EHD3, LZTR1, KIAA0040, DYSF, PDGFRA,
   [0344] f. Tissue protected: Kidney (tubules) TMEM243, SUN3, TRPM3, TMEM138, ZDHHC6, TBC1D3G, TREH, CHRM3, ACER3, ST3GAL6, THY1, UBE2J1, VIPR2, SLC22A15, SELPLG, MAPT, TMEM240, TRPV4, PIM1, ALPL, SLC6A4, TMEM263, ENPP1, SYNE3, SLC5A12, SLC5A2, SLC12A1, PCDHB2, PITPNM1, RNF144A, SLC25A40, SLC27A2, SLC6A19, SEMA4F, S1PR2, SLC34A3, SEMA5A, SLC26A1, RDH11, NEGR1, PTH1R, KIRREL1, AGER, RHBG, WHAMM, PTPRD, RAB27B, DLC1, PCDHA4, PDE2A, RECK, RALB, PSCA, KCNH8, KCNJ1, LIN7A, MRGPRF, LTBR, UCHL1, TRPM7, UPK3BL2, TMEM132E, KCNQ4, MAPKAP1, NOS1, LRRC55, NAT8, KIRREL3, NTRK2, EHD2, SLC25A15, OBSCN, NKAIN4, RFTN2, UGT2B4, ATP6V1D, SLC22A6, TMEM72, UGT3A1, TMEM132A, YIPF1, ATP6V0A4, SLC7A7, TUB, TMEM80, ZP2, QTRT1, TMEM252, TMEM128, TMEM174, PLAUR, ZDHHC13, PTPRB, RHCG, PRRG2, TMEM255B, UPK3BL1, SLC28A1, SLC22A2, SH2D3C, RHOG, SCAMP5, SLC22A8, SLC39A2, SLC6A12, RUFY3, SLC6A18, SLC13A2, TMEM213, SLC4A4, SLC23A1, RYK, TEX261, SLC35G2, OPRD1, PNLDC1, RIPK4, TSPAN2, TMEM171, TSPAN16, CA2, ENPP6, EMC4, EFHD1, IYD, CUBN, CLSTN2, EHD1, DLK1, FKRP, EVA1A, GSDMC, KIRREL2, EHD4, CPNE6, CYB5A, ABCG1, CLTRN, AIF1L, GJA5, GPC5, CDH6, CD177, FAM151A, CPT1C, B3GNT5, DCBLD1, GAS2, FAM107A, FNDC5, SLC2A2, ABHD17C, ADGRG5, CALCR, CREB3L2, EPHA4, FAM169A, GATM, ATRAID, CASR, FOLH1, ADGRA3, CD248, CLIC4, GJA1, FAM210A, FRRS1L, CYP2B6, FMO3, GLIPR1L2, KIAA0319, GPRC5B, IGSF11, LRRC37B, CDH2, FES, KMO, LRFN4, MAL2, BSND, BCL2L10, DSG1, ABCA8, AIG1, CDC42EP5, NPR3, ANKFY1, CDC42SE1, SH3BP5, ANPEP, BST1, CCR2, CLDN10, FXYD2, ACE, CATIP, BIK, CPT1B, COX7B, CTSL, ARRDC1, TMEM63B, DCXR, ACKR2, CMTM8, EPB41L3, COL6A2, ATP12A, PIK3AP1, CDH16, B3GAT1, DIP2A, MPP2, HMOX1, LRFN2, MYZAP, KCNJ10, MFAP3L, NDUFS1, GFRA2, KCNK5, EHD3, GK, MS4A4A, IGFLR1, FMO1, LRP2, LZTR1, ALOX12, KIAA0040, CHL1, NXPE2, SLC2A11, OR10R2, MRC1, MDGA2, KCTD8, DYSF, LRRK2, NPC1L1,
   [0345] g. Tissue protected: Heart (cardiomyocytes) TCTN2, SLC30A4, SLC27A6, SPAG4, TMEM138, ZDHHC6, UCP3, EFNB3, CAP2, CD300C, CD36, RASL10B, ST3GAL6, VIPR2, SLC22A15, MAPT, SYT13, TRPV4, SLC25A17, TGFBR3, PITPNM1, RNF144A, SGCB, NEGR1, NUS1, BVES, TMEM43, WHAMM, PTPRD, P2RY6, RECK, PLCH2, PLN, GPIHBP1, MRGPRF, ADIPOR2, SHISA4, FLT1, SGCG, SRL, KCNQ4, MAPKAP1, LANCL2, LRRC55, ART3, DMPK, EHD2, SLC25A15, OBSCN, RFTN2, TMEM132A, YIPF1, SLC7A7, YRDC, TREML1, ZP2, QTRT1, ZDHHC13, PTPRB, PRRG2, SH2D3C, SCAMP5, SLC39A2, SLC6A12, RYR1, SLAMF8, RUFY3, SLCO2B1, TEX261, SLC35B1, SLC35G2, TMEM171, EHD1, FKRP, EVA1A, MMP27, EHD4, ABCG1, ABCG2, CAVIN1, GPC5, CDH6, CDH15, CDH11, ADRA1A, B3GNT5, DCBLD1, GPX8, FNDC5, ABHD17C, CREB3L2, EPHA4, HHATL, FAM168B, CYB561A3, FCGR2B, CHRNA1, ADGRA3, CD248, GJA1, GPAT2, FGD2, GPRC5B, IGSF11, LRRC37B, CDH2, FES, MBOAT7, LEPROTL1, ADGRL4, CLIC2, FCGRT, B3GNT4, DGKZ, AIG1, ANKFY1, DMD, CDC42SE1, CD81, CNTNAP3, BST1, CAV1, CCR2, CADPS, BIK, CPT1B, COX7B, CDH13, CD1D, ARRDC1, ADRB1, CFC1, DCXR, CMTM8, BACE2, CNPPD1, MYZAP, MFAP3L, NCAM1, LIMS2, NDUFS1, KCNK5, EHD3, GPR15, GK, IGFLR1, SLC2A8, LZTR1, ALOX12, OR10R2, MCEMP1, DES, DYSF, LRRK2,
   [0346] h. Tissue protected: Thyroid TCTN2, SLC30A4, SLC27A6, TMEM138, ZDHHC6, CHRM3, ST3GAL6, TMEM100, TRIM13, UBE2J1, VIPR2, VPS33B, SLC22A15, SYT13, TRPV4, SLC25A17, TGFBR3, TMEM251, PIM1, ALPL, TMEM263, ENPP1, PCDHB2, RNF144A, SEMA4F, SEMA5A, NEGR1, NUS1, BVES, TPO, TMEM43, WHAMM, GPIHBP1, LIN7A, ADIPOR2, UPK3BL2, KCNQ4, MAPKAP1, TAOK2, LANCL2, LRRC55, NTRK2, SLC25A15, OBSCN, PORCN, YIPF1, SLC7A7, TUB, YRDC, TMEM80, QTRT1, TMEM128, PRRG2, TMEM255B, UPK3BL1, RTP5, SLC39A2, RUFY3, SLCO2B1, RYK, TEX261, PNLDC1, TMEM171, C19orf18, EFHD1, IYD, DUOX1, EHD1, EVA1A, GPR37, EHD4, ABCG1, ABCG2, AIF1L, CAVIN1, GPC5, CDH6, B3GNT5, DCBLD1, GPX8, CREB3L2, EPHA4, GATM, FAM168B, ATRAID, FCGR2B, ADGRA3, CD99, GJA1, FAM210A, GPAT2, FGD2, FMO3, IPCEF1, IGSF11, CDH2, FES, ADGRL4, CLIC2, ANKFY1, BASP1, ELMO2, AAK1, CAV1, AQP4, CRHR1, BIK, ANXA1, ARRDC1, TMEM63B, DCXR, ACKR2, CMTM8, CDH16, ARFGAP3, CAVIN2, MPP2, MTNR1B, MYZAP, NCAM1, NDUFS1, GFRA2, KCNK5, GPR15, GK, IGFLR1, LZTR1, SLC2A11, OR10R2, NCS1, GAA,
   [0347] i. Tissue protected: Pancreatic endocrine cells (Islets) SLC30A4, CHRM3, ACER3, SCGN, UBE2J1, MAPT, SYT13, TRPV4, SLC25A17, TGFBR3, PIM1, ALPL, STX1A, RAB3A, PITPNM1, RNF144A, RTN1, SCG3, NEGR1, PTGDR2, RAB3B, ADIPOR2, UCHL1, UPK3BL2, KCNQ4, MAPKAP1, TAOK2, PTPRN, LANCL2, PTH2R, LRRC55, KIRREL3, OBSCN, NECAB2, SLC17A6, ATP6V1D, SV2A, TUB, YRDC, TSPAN7, TNS2, PLAUR, ZDHHC13, SLC30A8, PRNP, PRRG2, TMEM255B, UPK3BL1, SCAMP5, SYP, SLC39A2, RUFY3, SLCO2B1, TEX261, MAPK10, SLC35G2, OPRD1, TSPAN2, EMC4, DLK1, FFAR2, DGCR2, CLTRN, CDH6, B3GNT5, GNAO1, CREB3L2, FAM169A, CASR, ADGRA3, CD99, CD82, CYP2B6, IGSF11, CDH2, DGKZ, ANKFY1, CD81, ELMO2, FXYD2, AMPH, CADPS, CRHR1, CD1D, ARRDC1, CFC1, EPB41L3, COL6A2, BBS7, GAD2, ARFGAP3, MPP2, GFRA2, IGFLR1, FMO1, OR10R2, MDGA2, GAA,
   [0348] j. Tissue protected: Pancreatic exocrine cells TCTN2, TMEM138, CLEC10A, CD300C, CHRM3, RASL10B, ST3GAL6, TBC1D3D, TMEM100, UBE2J1, SELPLG, SYT13, PIM1, ALPL, TMEM263, ENPP1, SLC27A2, TMEM97, SLC26A1, TMEM43, WHAMM, RAB27B, PCDHA4, PSCA, KCNH8, MRGPRF, ADIPOR2, UPK3BL2, TMEM132E, SCUBE1, PTH2R, LRRC55, OBSCN, ATP6V1D, TMEM72, UGT3A1, YRDC, TMEM80, UNC13D, TMEM128, PLAUR, TBC1D3E, ZDHHC13, PTPRB, TMEM255B, UPK3BL1, SYCN, SCAMP5, SLC39A2, RUFY3, SLCO2B1, SLC4A4, RYK, SLC19A1, PNLDC1, ARHGAP27, CA2, EFHD1, CUZD1, EVA1A, KIRREL2, FA2H, CYB5A, ABCG1, CDH6, B3GNT5, CYSTM1, CREB3L2, GATM, EPHX1, FCGR2B, CD248, FAM210A, GPAT2, FGD2, FMO3, GPRC5B, IGSF11, LRRC37B, FES, LEPROTL1, CDC42SE1, CD81, ANPEP, CNTNAP3, CLDN10, FXYD2, CADPS, AQP5, BIK, CTSL, ARRDC1, CHST4, CMTM8, COL6A2, PIK3AP1, BBS7, ARFGAP3, AQP12A, AQP12B, CAVIN2, MPP2, LRFN5, MYZAP, NCAM1, NDUFS1, GFRA2, IGFLR1, SLC2A11, OR10R2, LRRK2, GAA,
[0349] 7. Cancer treated: liver cancer
   [0350] a. Tissue protected: Colon ZDHHC2, MS4A8, MGAT4C, SCGN, SLC14A1, UBE2J1, SNTG2, STX1A, SLC5A6, SLC26A2, SLC25A33, GOLGA8B, RNF145, MGAM, PILRA, MUC12, WHAMM, KLRG1, DLC1, PLCB3, RNF215, PSTPIP2, RAB3B, PSCA, KCNH8, TPSG1, TRPM7, UPK3BL2, SLC18A1, ITLN1, PTGDR, ADCYAP1R1, SYNGR4, OSBPL7, LRRC55, PLPP7, MAST2, SLC8A1, OBSCN, TMEM72, SLC3A1, SCARF1, XKR9, VSIG10, SYT11, VSTM5, ZP2, QTRT1, TMEM69, TMEM41A, UNC13B, PLAUR, UPK3BL1, SLC46A2, ARHGAP17, SEZ6, SCAMP5, RAB27A, RNF103, SYP, PTPRN2, SNX6, SEC11C, PHLPP2, TRAF3IP3, VTCN1, UBL3, ATG2B, C2CD2L, JAM3, DPEP1, GPBAR1, IGSF8, PHKA1, AIF1L, GPC5, CLCA1, CADM4, FAM126B, RASGRP2, DOCK8, ENOX2, CALN1, GOLGA8A, ADGRE1, CHODL, ANKRD13A, CARMIL2, EPCAM, CPTP, ABHD16A, CXCR1, FER1L6, BEST2, GAL3ST2, KDELR3, CLN3, SH3BP5, CLDN11, KCNIP3, ATP1A2, CADPS, B3GNT6, EPB41L3, ABHD12, COL6A2, BCL2L13, C12orf66, CNPPD1, PAM, ALG14, CASD1, B3GAT1, CASQ1, DIP2A, IBTK, ABCC5, LRFN5, MYZAP, IFFO1, MC4R, MS4A12, MARCKS, MCUB, GNG12, SLC16A10, LZTR1, MUC13, NFXL1, NEU4, OR10R2, MRC1, NDST2,
   [0351] b. Tissue protected: Lung VSIG4, SLC30A4, SLC14A1, TRIM13, UBE2J1, SLC22A15, TGFBR3, SLC6A14, RNF145, TRPV6, SLC18A2, WHAMM, REEP2, RNF215, PTPRG, MGAT4B, STX5, MXRA7, OSBPL7, MAST2, EHD2, OBSCN, VSTM5, QTRT1, P2RY2, SEZ6, RHOG, PSD4, RNF103, STEAP1, PHLPP2, UBL3, ATG2B, EHD1, GPBAR1, EHD4, CD247, CCR7, GPC5, ECEL1, CALN1, HCLS1, ANKRD13A, CCDC88A, CLIC2, CXCR1, DGKZ, ANK2, AQP4, ACE, BSN, AQP3, COL6A2, CACNA1C, IBTK, LAMP3, MC4R, MARCKS, EHD3, NSMF,
   [0352] c. Tissue protected: Skin TMEM243, ZDHHC2, SUN3, ACER3, MGAT4C, PERP, RXFP1, SOX10, SNTG2, TGFBR3, SLC5A6, SLC6A1, TMEM97, RNF145, MTMR2, REEP2, RNF215, KCNH8, LTBR, MGAT4B, TYROBP, STX5, SLC10A6, MXRA7, LANCL2, LRRC55, PLPP7, MAST2, LYPD3, PLA2G4E, SLC8A1, DMPK, OBSCN, RMC1, TMEM79, VSTM5, YRDC, ZP2, TMEM69, P2RY2, ARHGAP17, NGFR, SLC19A1, RIPK4, TRAF3IP3, C2CD2L, CLCA2, COL17A1, CYBA, IGSF8, FA2H, PHKA1, DSP, GPC5, CDH6, ANO7, FYN, GPX8, FAM126B, ENOX2, CALN1, FAT2, CD248, CAPNS2, ANKRD13A, CARMIL2, HCN1, GSDMA, B3GNT4, DSG1, KDELR3, ANK2, MS4A1, CD1D, ASPRV1, DSG3, AQP3, BCL2L13, CLEC2A, CNPPD1, ATP12A, PAM, IBTK, ABCC5, MYZAP, MC4R, MARCKS, MCUB, GNG12, TACR1, CHL1, OR10R2, NCS1, TMEM243, SLC30A4, ZDHHC6, MS4A8, SLC2A1, TRIM13, UBE2J1, SLC6A14, TYR, SLC25A33, GOLGA8B, PDGFC, RHBG, DLC1, PLN, RASA4, OSBPL7, XKR9, QTRT1, DCT, UNC13B, PRNP, SH2D3C, RHOG, S100A8, PMEL, SEMA5B, PHLPP2, VTCN1, UPK3A, EHD1, GSDMC, EHD4, AIF1L, ADCY7, HLA-DPA1, EVI2A, FCGR2B, GOLGA8A, ADGRE1, GPAT2, DNER, FGD2, CPTP , CXCR1, DGKZ, CDH13, CACNA1C, ALG14, ADGRA1, MPP2, LHFPL6, MUC21, IFFO1, EHD3, KIT, LZTR1, KIAA0040, ,
   [0353] d. Tissue protected: Liver SLC14A1, TRIM13, UBE2J1, SLC25A40, SLCO1B3, SLCO1B1, SLC25A33, SLC18A2, MTMR2, RNF215, MGAT4B, RASA4, STX5, SYNGR4, PRRT2, LRRC55, PNPLA3, MAST2, SLC8A1, OBSCN, SLC3A1, UNC13B, ARHGAP17, ST7L, JAM3, GPR37, GLRB, FYN, CADM4, RASGRP2, FOLH1, CARMIL2, NINJ1, ATP1A2, B3GAT1, CASQ1, IBTK, MYZAP, LIMS2, GPR15, LZTR1, OR10R2, NDST2,
   [0354] e. Tissue protected: Kidney (glomeruli) ZDHHC6, ACER3, MGAT4C, SLC14A1, UBE2J1, KDR, SLC22A15, TGFBR3, SLC45A1, RNF145, MGAM, PODXL, PDGFC, PILRA, TRPV6, WHAMM, RNF215, PTPRG, TPSG1, STX5, PTGDR, ADCYAP1R1, PLA2R1, PTH2R, LRRC55, PNPLA3, MAST2, MAP6, NOS3, EHD2, NPHS2, RMC1, SCARF1, VSTM5, TSPAN7, ARHGAP17, SNCA, PSD4, RNF103, SNX6, THSD7A, PITPNM3, PTPRO, SREBF1, RTL1, JAM3, EHD1, EHD4, AIF1L, GPC5, CDH6, FYN, CD93, FAM107A, CD34, FAM126B, RASGRP2, EVI2A, CALN1, ENG, CD248, DOCK8, ADGRE1, CR1, FGD2, MAS1, CLIC2, CLN3, CHRM1, BSN, CDH13, AKAP12, COL6A2, CACNA1C, PAM, B3GAT1, LIMS2, ITGA8, EHD3, GNG12, MLIP, LZTR1, NFXL1, KIAA0040, NEU4, PDGFRA,
   [0355] f. Tissue protected: Kidney (tubules) TMEM243, ZDHHC2, SUN3, ZDHHC6, TBC1D3G, TREH, MS4A8, ACER3, MGAT4C, THY1, SLC14A1, UBE2J1, SLC22A15, SELPLG, TMEM240, SLC5A12, SLC12A1, TLN2, PCDHB2, SLC25A40, S1PR2, SLC34A3, SLC25A33, GOLGA8B, MGAM, SLC28A2, RDH11, PTH1R, PDGFC, RHBG, WHAMM, RHBDD2, DLC1, PLCB3, PDE2A, RALB, RNF215, PSCA, KCNH8, LTBR, UCHL1, MGAT4B, TRPM7, UPK3BL2, RASA4, STX5, TMEM52B, PTGDR, ADCYAP1R1, NOS1, PRRT2, OSBPL7, LRRC55, PNPLA3, PLPP7, MAST2, SLC8A1, NTRK2, EHD2, OBSCN, RFTN2, SLC22A6, TMEM72, UGT3A1, SLC3A1, XKR9, VSIG10, ATP6V0A4, VSTM5, ZP2, QTRT1, TMEM252, TMEM174, TMEM41A, UNC13B, PLAUR, UPK3BL1, SLC46A2, ARHGAP17, SLC28A1, SEMA6B, SIRT2, SH2D3C, RHOG, SCAMP5, RNF103, SLC22A8, SNX6, SLC6A18, SLC13A2, SLC5A1, TMEM184A, SLC4A4, SEC11C, SREBF1, SLC35G2, RIPK4, VTCN1, TSPAN16, UPK3A, UBL3, ATG2B, ENPP6, EMC4, JAM3, IYD, DPEP1, ENPP3, CUBN, CLSTN2, EHD1, DLK1, GPBAR1, IGSF8, GLRB, GSDMC, KIRREL2, EHD4, PHKA1, AIF1L, GPC5, ADCY7, CDH6, CPT1C, CADM4, FAM107A, FNDC5, CLCNKB, FAM126B, ADGRG5, CLCNKA, DOCK8, ENOX2, EVI2A, CASR, FOLH1, GOLGA8A, CD248, CLIC4, ADGRE1, FRRS1L, ANKRD13A, CARMIL2, EPCAM, GLIPR1L2, KIAA0319, CPTP, EPHB1, ABHD16A, BSND, CXCR1, AQP6, DSG1, NPR3, CDC42SE1, ANK2, SH3BP5, SLC7A9, ACE, CATIP, BSN, CPT1B, AQP3, EPB41L3, COL6A2, C12orf66, ATP12A, C5AR1, CACNA1C, CDH16, B3GAT1, CASQ1, DIP2A, IBTK, MPP2, ABCC5, LRFN2, MYZAP, KCNJ10, KCNJ12, IFFO1, MC4R, MARCKS, MCUB, EHD3, GNG12, MLIP, SLC16A10, FMO1, LRP2, LZTR1, NFXL1, KIAA0040, MFSD1, CHL1, IL23R, OR10R2, MRC1, NSMF, NDST2,
   [0356] g. Tissue protected: Heart (cardiomyocytes) SLC30A4, SPAG4, ZDHHC6, UCP3, MGAT4C, RASL10B, SLC14A1, SLC22A15, TGFBR3, TLN2, SGCB, SLC25A33, RNF145, WHAMM, POPDC2, PLCH2, PLN, RNF215, SHISA4, MGAT4B, FLT1, RASA4, SGCG, SRL, MXRA7, PPP1R3A, PRRT2, OSBPL7, LANCL2, LRRC55, ART3, PLPP7, MAST2, SLC8A1, DMPK, EHD2, OBSCN, RFTN2, XKR9, YRDC, TREML1, ZP2, QTRT1, TMEM41A, ARHGAP17, SEMA6B, SIRT2, SH2D3C, SCAMP5, RAB27A, SLAMF8, SNX6, SEMA5B, SLC35G2, VTCN1, UPK3A, UBL3, ATG2B, JAM3, EHD1, MMP27, EHD4, PHKA1, DSP, GPC5, ADCY7, CDH6, CDH15, ADRA1A, CADM4, GPX8, FNDC5, FAM126B, RASGRP2, SLC2A4, HHATL, FAM168B, CALN1, FCGR2B, CHRNA1, CD248, GPAT2, FGD2, ANKRD13A, CARMIL2, CAMK2B, MBOAT7, CPTP, CLIC2, ABHD16A, CXCR1, FCGRT, B3GNT4, DGKZ, CDC42SE1, CLN3, ANK2, ATP1A3, ATP1A2, BSN, CADPS, CPT1B, CDH13, CD1D, AKAP6, BCL2L13, CNPPD1, CACNA1C, PAM, CASQ1, IBTK, ABCC5, MYZAP, NCAM1, GPR182, LIMS2, MC4R, MCUB, EHD3, GPR15, MLIP, SLC16A10, LZTR1, NFXL1, OR10R2, MCEMP1, DES, NDST2,
   [0357] h. Tissue protected: Thyroid SLC30A4, ZDHHC6, TRIM13, UBE2J1, VPS33B, SLC22A15, TGFBR3, TMEM251, SLITRK4, SLC5A5, SLC6A14, TLN2, PCDHB2, SLC25A33, RNF145, TPO, TRPV6, WHAMM, RHBDD2, RNF215, UPK3BL2, MXRA7, OSBPL7, LANCL2, PSD3, LRRC55, PLPP7, MAST2, SLC8A1, NTRK2, OBSCN, PORCN, XKR9, YRDC, QTRT1, TMEM41A, UNC13B, UPK3BL1, ARHGAP17, RTP5, RNF103, RNFT2, SREBF1, VTCN1, UBL3, C19orf18, C2CD2L, JAM3, IYD, DUOX1, EHD1, GPR37, EHD4, PHKA1, AIF1L, GPC5, CDH6, FYN, CADM4, GPX8, CLCNKB, FAM126B, RASGRP2, CLCNKA, FAM168B, CALN1, FCGR2B, ADGRE1, GPAT2, FGD2, ANKRD13A, CARMIL2, HCN1, IPCEF1, EPCAM, CAMK2B, CLIC2, EPHB1, CXCR1, FER1L6, ANK2, AAK1, AQP4, CRHR1, AKAP12, C12orf66, C5AR1, CACNA1C, CDH16, CDH10, AP3B2, IBTK, MPP2, MTNR1B, MYZAP, NCAM1, MC4R, GNG12, GPR15, LZTR1, MFSD1, OR10R2, NCS1, NDST2,
   [0358] i. Tissue protected: Pancreatic endocrine cells (Islets) ZDHHC2, SLC30A4, ACER3, SCGN, UBE2J1, TGFBR3, STX1A, RAB3A, RTN1, SLC25A33, RNF145, SCG3, RNF215, RAB3B, UCHL1, UPK3BL2, STX5, MXRA7, PTPRN, LANCL2, PTH2R, LRRC55, MAST2, SLC8A1, OBSCN, NECAB2, SLC17A6, XKR9, SV2A, YRDC, TMEM69, TSPAN7, UNC13B, PLAUR, SLC30A8, PRNP, UPK3BL1, SCAMP5, RAB27A, RNF103, SYP, PTPRN2, MAPK10, SLC35G2, ATG2B, C2CD2L, EMC4, JAM3, DLK1, DGCR2, PHKA1, CDH6, GNAO1, FBXO2, CASR, ANKRD13A, CARMIL2, EPCAM, CXCR1, DGKZ, ENO2, ATP1A2, CADPS, CRHR1, CD1D, EPB41L3, COL6A2, PAM, GAD2, IBTK, MPP2, ABCC5, MC4R, MARCKS, FMO1, OR10R2,
   [0359] j. Tissue protected: Pancreatic exocrine cells ZDHHC2, RASL10B, TBC1D3D, UBE2J1, SELPLG, TMEM97, SLC25A33, RNF145, PDGFC, WHAMM, RNF215, PSCA, KCNH8, UPK3BL2, STX5, MXRA7, PTH2R, LRRC55, PLPP7, MAST2, SLC8A1, OBSCN, TMEM72, UGT3A1, SLC3A1, VSIG10, VSTM5, YRDC, UNC13D, TMEM41A, UNC13B, PLAUR, TBC1D3E, UPK3BL1, ARHGAP17, SYCN, SCAMP5, RAB27A, RNF103, SLC4A4, SEC11C, SLC19A1, TRAF3IP3, DPEP1, CUZD1, GLRB, KIRREL2, FA2H, DSP, ADCY7, CDH6, RASGRP2, DOCK8, EVI2A, FBXO2, FCGR2B, CD248, GPAT2, FGD2, ANKRD13A, CARMIL2, EPCAM, KDELR3, CDC42SE1, CLN3, BSN, CADPS, CHST4, COL6A2, C12orf66, ALG14, CASQ1, AQP12A, AQP12B, IBTK, MPP2, LRFN5, MYZAP, NCAM1, IFFO1, MC4R, MARCKS, MCUB, GNG12, SLC16A10, NFXL1, OR10R2, NDST2,
[0360] 8. Cancer treated: stomach cancer
   [0361] a. Tissue protected: Colon TMEM158, UGT2A3, TMEM138, TECR, MAP1LC3A, CACNB2, CD36, MGAT4C, SCGN, SLC14A1, TMEM245, TM4SF18, UBE2J1, SNTG2, SYT13, ALPL, STX1A, SUSD3, SLC26A2, TEX2, SLC27A2, SH3BP4, SCD5, RALGPS2, RNF145, SERINC3, SLC26A1, BVES, LDLR, P2RX6, PILRA, MUC12, TSPAN33, DLC1, PCDHA4, RECK, RRAD, PIGU, RAB3B, KCNH8, MRGPRF, TPSG1, UPK3BL2, SLC18A1, STYK1, TMEM134, ITGA9, PTGDR, ADCYAP1R1, SNX1, SYNGR4, SMPD2, NDUFAF5, OSBPL7, GNAI3, LRRC55, PALM, PLPP7, MSRA, MRC2, SORD, OBSCN, MFN2, SPRED1, UGT2B4, SLC26A3, TMEM72, SLC3A1, TMEM132A, UGT2B17, VSIG10, RNF112, SYT11, TMEM236, VSTM5, UTRN, UGT2B28, ZDHHC8, ZP2, QTRT1, TMEM69, SYTL3, TMEM128, TBCD, TMEM41A, PLAUR, ZFYVE9, UGT2B15, UPK3BL1, SCAMP5, SYP, SLC6A12, RUFY3, SNX6, TMEM204, SEC11C, PHLPP2, SLC35B1, TCTN3, ARHGEF12, ATG2B, C2CD2L, CHST3, GGT1, GNAI1, JAM3, HTR7, FMO5, IL9R, ABCG2, CD177, CLCA1, GLP2R, B3GNT5, FKBP2, GNB5, ADGRF1, FAM126B, HTR1A, ENOX2, FGFRL1, GABARAPL1, FMNL3, ADGRE1, CHODL, ANKRD13A, CARMIL2, CYP4X1, DEPDC5, DAG1, GBP2, LRRC37B, HSD17B2, ABHD16A, CXCR1, ANKRD13B, BEST2, ABCG8, CDC42EP5, BCL2, MPP1, GAL3ST2, CLN5, B3GALT5, CDHR2, CLN3, ACE2, SH3BP5, CNTNAP3, ANO9, SLC25A31, CLDN11, KCNIP3, ATP1A2, ATP2A2, ARRDC1, CIB1, ORAI1, ADGRG6, ASIC5, ACKR2, AP1S3, ASPHD1, EPB41L3, ABHD12, CNPPD1, ALG14, CASD1, DAPP1, B3GAT1, CYP2C9, DIP2A, IBTK, ABCC5, HMOX1, SLC9A3R2, LRFN5, SLC16A6, MYZAP, MS4A18, MS4A12, GFRA2, MCUB, JAML, NIPAL1, LZTR1, ALOX12, POMGNT1, NEU4, OR10R2, MRC1, PRKCA,
   [0362] b. Tissue protected: Lung TGM2, VSIG4, SLC30A4, EFNB3, CACNB2, CD300C, SLC14A1, TRIM13, TMEM245, UBE2J1, SLC22A15, TRPV4, SLC25A17, TGFBR3, SLC6A14, SUSD3, RNF144A, RNF145, SERINC3, SLC26A1, BVES, AGER, TSPAN33, TRPV6, SLC18A2, RECK, REEP2, PTPRG, MGAT4B, SNX1, SMPD2, OSBPL7, GNAI3, PALM, KIRREL3, MRC2, EHD2, OBSCN, MFN2, VSTM5, UTRN, QTRT1, TBC1D3, P2RY2, RHOG, PSD4, RUFY3, PHLPP2, SIGLEC9, ARHGEF12, ATG2B, GNAI1, EHD1, EHD4, CD247, CCR7, SLC44A2, AOC3, FKBP2, GNB5, FGFRL1, EPHX1, GABARAPL1, HCLS1, FMNL3, ANKRD13A, CCDC88A, DAG1, GBP2, AIFM2, CLEC2B, CLIC2, CXCR1, ANKRD13B, ABCA8, ABCG8, AIG1, ANK2, CAV1, AQP4, CACNA2D2, ACE, AP3S1, BSN, AP3S2, ASPHD1, CACNA1C, DAPP1, CXCR3, CAVIN2, IBTK, LAMP3, EHD3, PI4KA, SLC34A2, ICAM1, LRRK2,
   [0363] c. Tissue protected: Skin TMEM243, SUN3, TMEM138, CACNB2, CLEC10A, CD300C, MGAT4C, PERP, STRA6, TMEM245, RXFP1, SOX10, SNTG2, TRPV4, SLC25A17, TGFBR3, ALPL, TMPRSS11D, SLC6A1, RTN3, SH3BP4, TMEM97, RALGPS2, RNF145, SLC26A1, NEGR1, SLC26A9, MTMR2, PIGU, REEP2, KCNH8, GPIHBP1, MGAT4B, TYROBP, STYK1, TMEM134, ITGA9, PCDH19, SLC10A6, SNX1, SMPD2, LANCL2, GNAI3, LRRC55, PALM, PLPP7, LAX1, LYPD3, KRT1, F2R, PLA2G4E, MRC2, SORD, OBSCN, RMC1, TMEM79, VSTM5, YRDC, UTRN, ZP2, TMEM69, SYTL3, TMEM128, THBD, TBCD, TACSTD2, UGT2B15, P2RY2, S1PR5, NGFR, TMEM204, SIGLEC9, ARHGEF12, C2CD2L, CHST3, CLCA2, GNAI1, COL17A1, FFAR2, FA2H, CYP2W1, CD177, GLP2R, ANO7, FYN, FKBP2, FAM126B, GPR84, ENOX2, FGFRL1, GPR39, ATRAID, FAT2, CD99, CD248, FMNL3, CAPNS2, ANKRD13A, CARMIL2, MALL, DAG1, GBP2, DEF6, DSC3, LRRC37B, B3GNT4, DSG1, ABCA8, ABCG8, ADGRF4, CLN5, CD81, ANK2, BST1, CAV1, CCR2, ANO9, SLC25A31, MS4A1, CAV3, CD1D, ASPRV1, CIB1, ORAI1, ACSBG1, ASIC5, TMEM63B, DSG3, ACKR2, ASPHD1, CLEC2A, CNPPD1, ATP12A, DAPP1, IBTK, ABCC1, ABCC5, MYZAP, MCUB, FGFR3, NIPAL1, TACR1, ALOX12, CHL1, POMGNT1, PI4KA, SLC2A11, OR10R2, NCS1, TMEM243, TCTN2, SLC30A4, TECR, LRIG1, ARMCX2, SLC2A1, TRIM13, UBE2J1, SYT13, ULBP3, SLC6A14, SUSD3, TEX2, SCD5, RHBG, TSPAN33, WIPI2, DLC1, PLN, KCNQ4, TECTA, NDUFAF5, OSBPL7, ICAM3, MFN2, SPRED1, QTRT1, TBC1D3, DCT, PRNP, RHCG, SNTB1, SH2D3C, RHOG, S100A8, RUFY3, P MEL, SEMA5B, PHLPP2, TCTN3, UPK3A, DTL, EHD1, GSDMC, EHD4, ADCY7, HLA-DPA1, B3GNT5, EVI2A, FCGR2B, GLMP, FAM210A, ADGRE1, GPAT2, DNER, CYP4X1, CLEC2B, CXCR1, BCL2, BASP1, AP3S1, ATP2A2, CDH13, AP3S2, CACNA1C, ALG14, ADGRA1, CAVIN2, MPP2, LHFPL6, MUC21, GFRA2, EHD3, JAML, KIT, LZTR1, KIAA0040, ,
   [0364] d. Tissue protected: Liver SLC13A5, TMEM138, TECR, MAP1LC3A, CACNB2, CLEC10A, CD300C, SLC14A1, STRA6, TRIM13, TMEM245, TM4SF18, UBE2J1, SYT13, SLC25A17, ALPL, SLC6A4, SYNE3, SUSD3, RNF144A, SLC27A2, SLCO1B3, SCD5, SLCO1B1, RDX, SLC27A5, SERINC3, SLC26A1, NEGR1, LDLR, SLC18A2, KSR2, MTMR2, PTGDR2, RECK, RRAD, PIGU, PDZK1, RDH16, LIN7A, MGAT4B, ITGA9, KCNQ4, PCDH19, SNX1, SYNGR4, SMPD2, PRRT2, NDUFAF5, LRRC55, NAT8, MSRA, KIRREL3, SORD, OBSCN, SPRED1, UGT2B4, SLC3A1, TMEM132A, YIPF1, TFR2, UTRN, ZDHHC8, TMEM128, TNS2, TBCD, UGT2B15, SLC6A12, RUFY3, SLCO2B1, TMEM204, TEX261, TSPAN2, SIGLEC9, GGT1, JAM3, FMO5, GPR37, GLRB, CYP2W1, CYP2D6, GJA5, CD177, B3GNT5, FYN, GAS2, SLC2A2, HTR1A, CREB3L2, CYP2A7, HEPACAM, FGFRL1, EPHX1, GABARAPL1, FOLH1, CYP1A2, CYP3A4, FAM210A, FMNL3, CYP2A6, CARMIL2, FMO3, DEPDC5, MALL, GBP2, ABCB4, NINJ1, CYP2C8, LRRC37B, CDH2, CLEC2B, KMO, HSD17B2, MAL2, CYP2C19, BCL2L10, AQP9, ABCA8, ABCG8, AIG1, CLN5, CDHR2, ANO9, ASGR1, ADRA2B, ABCB11, ATP1A2, CMKLR1, CYP2A13, CTSL, ARRDC1, ASIC5, TMEM63B, ASPHD1, HSD11B1, BACE2, ASGR2, DAPP1, B3GAT1, INTS2, CAVIN2, CYP2C9, IBTK, SLC9A3R2, SLC16A6, MYZAP, MFAP3L, LIMS2, KCND1, GPR15, NIPAL1, LZTR1, ALOX12, POMGNT1, PI4KA, SLC2A11, OR10R2, ABCC2, LRRK2, GAA, NPC1L1,
   [0365] e. Tissue protected: Kidney (glomeruli) ZDHHC16, TMEM138, TECR, LRIG1, ARMCX2, CACNB2, MGAT4C, SLC14A1, TMEM245, TM4SF18, UBE2J1, KDR, SLC22A15, SYT13, TRPV4, SLC25A17, TGFBR3, SYNE3, SUSD3, SLC45A1, TEX2, RNF144A, SH3BP4, RALGPS2, RNF145, KIRREL1, P2RX6, PILRA, TSPAN33, TRPV6, KSR2, RECK, RRAD, PTPRG, MRGPRF, SLC34A1, TPSG1, SCUBE1, TECTA, PTGDR, ADCYAP1R1, SNX1, SMPD2, PLA2R1, NDUFAF5, PTH2R, GNAI3, LRRC55, PALM, F2R, KIRREL3, MAP6, MRC2, NOS3, EHD2, MPP5, NKD1, NPHS2, RMC1, VSTM5, UTRN, TSPAN7, TTC7B, TNS2, ZFYVE9, STK10, SNCA, PSD4, SLC6A12, SNX6, THSD7A, PITPNM3, PTPRO, SLC35B1, ARHGEF12, GNAI1, JAM3, HTR7, EHD1, EHD4, FYN, GAS2, CD93, FAM107A, GNB5, ADGRF1, CD34, FAM126B, HTR1A, EVI2A, GABARAPL1, ENG, CD99, CD248, DOCK8, FAM210A, FMNL3, ADGRE1, CR1, DAG1, GBP2, CLEC2B, MAS1, ADGRL4, CLIC2, ABCG8, B3GALT5, CLN3, ACKR1, CAV1, ANO9, CHRM1, BSN, CDH13, ASPHD1, CACNA1C, DAPP1, B3GAT1, ABCC1, SLC9A3R2, LIMS2, ITGA8, EHD3, MLIP, JAML, LZTR1, KIAA0040, PI4KA, NEU4, ICAM1, DYSF, PDGFRA,
   [0366] f. Tissue protected: Kidney (tubules) TMEM243, SUN3, TRPM3, TMEM138, TECR, TBC1D3G, TREH, ARMCX2, CACNB2, MGAT4C, THY1, SLC14A1, STRA6, TMEM245, TM4SF18, UBE2J1, SLC22A15, SELPLG, TMEM240, TRPV4, ALPL, SLC6A4, SYNE3, SLC5A12, SLC5A2, SUSD3, STIMATE, TEX2, SLC12A1, TLN2, PCDHB2, RNF144A, SLC27A2, SH3BP4, SCNN1D, SCD5, RDX, SLC6A19, S1PR2, SLC34A3, RALGPS2, SERINC3, SLC26A1, SLC28A2, RDH11, NEGR1, PTH1R, KIRREL1, LDLR, P2RX6, AGER, RHBG, WIPI2, RHBDD2, DLC1, PCDHA4, RECK, RRAD, PIGU, RALB, PDZK1, KCNH8, KCNJ1, LIN7A, MRGPRF, UCHL1, MGAT4B, SLC34A1, UPK3BL2, PRICKLE1, STYK1, TMEM134, TMEM52B, ITGA9, KCNQ4, PCDH19, PTGDR, ADCYAP1R1, SNX1, NOS1, SMPD2, PRRT2, NDUFAF5, OSBPL7, GNAI3, LRRC55, NAT8, PALM, PLPP7, MSRA, KIRREL3, MRC2, SORD, EHD2, MPP5, OBSCN, MFN2, RFTN2, SPRED1, UGT2B4, ATP6V1D, SLC22A6, TMEM72, UGT3A1, XPNPEP2, SLC3A1, TMEM132A, VSIG10, YIPF1, ATP6V0A4, VSTM5, UTRN, ZDHHC8, ZP2, QTRT1, TMEM252, SYTL3, TMEM128, TMEM174, TTC7B, TBC1D3, TBCD, TMEM41A, PLAUR, ZFYVE9, RHCG, UPK3BL1, SLC28A1, SEMA6B, SNTB1, SLC22A2, SH2D3C, RHOG, SCAMP5, SLC22A8, SLC6A12, RUFY3, SNX6, SLC6A18, SLC13A2, TMEM213, SLC5A1, SYT7, TMEM204, SLC4A4, SEC11C, TEX261, SLC35G2, OPRD1, TSPAN2, TSPAN16, UPK3A, ARHGEF12, ATG2B, CHST3, ENPP6, GGT1, GNAI1, JAM3, IYD, ENPP3, CUBN, CLSTN2, EHD1, DLK1, FMO5, GLRB, GSDMC, KIRREL2, EHD4, CKMT2, CPNE6, CLTRN, SLC44A2, GJA5, ADCY7, CD177, CPT1C, B3GNT5, GAS2, FAM107A, FKBP2, SLC2A2, GNB5, CLCNKB, FAM126B, HTR1A, ADGRG5, CALCR, CLCNKA, CREB3L2, ENOX2, EVI2A, FAM169A, FGFRL1, GABARAPL1, GPR39, ATRAID, CASR, FOLH1, CD248, CLIC4, FAM210A, ADGRE1, FRRS1L, ANKRD13A, CARMIL2, FMO3, DEPDC5, GLIPR1L2, LPXN, GBP2, KIAA0319, LRRC37B, CDH2, CLEC2B, KMO, LRFN4, MAL2, EPHB1, ABHD16A, BSND, BCL2L10, CXCR1, AQP6, DSG1, ABCA8, ABCG8, AIG1, CDC42EP5, NPR3, BCL2, MPP1, CLN5, CDC42SE1, CDHR2, ANK2, SH3BP5, BST1, CCR2, ANO9, SLC7A9, CLDN10, DUSP15, SLC25A31, FXYD2, ACE, AP3S1, CATIP, CMKLR1, ATP2A2, BSN, CAV3, CPT1B, COX7B, CTSL, ARRDC1, CIB1, ASIC5, AP3S2, TMEM63B, ACKR2, ANO5, AP1S3, ASPHD1, EPB41L3, ATP12A, C5AR1, CACNA1C, CDH16, B3GAT1, INTS2, DIP2A, IBTK, MPP2, ABCC5, HMOX1, LRFN2, SLC16A6, MYZAP, KCNJ10, KCNJ12, MFAP3L, GFRA2, KCND1, KCNK5, MCUB, EHD3, MLIP, JAML, NIPAL1, LRP2, LZTR1, ALOX12, KIAA0040, MFSD1, CHL1, POMGNT1, PI4KA, SLC2A11, IL23R, OR10R2, MRC1, ABCC2, LRRC24, MDGA2, PRKCA, DYSF, LRRK2, NPC1L1,
   [0367] g. Tissue protected: Heart (cardiomyocytes) TGM2, TCTN2, SLC30A4, SLC27A6, SPAG4, TMEM138, TECR, UCP3, EFNB3, ARMCX2, CAP2, CACNB2, CD300C, CD36, MGAT4C, SLC14A1, STRA6, TMEM245, SLC22A15, SYT13, TRPV4, SLC25A17, TGFBR3, SUSD3, TEX2, TLN2, RNF144A, RTN3, SCD5, SGCB, RALGPS2, RNF145, SERINC3, NEGR1, BVES, LDLR, P2RX6, TSPAN33, POPDC2, P2RY6, RECK, PLN, RRAD, GPIHBP1, MRGPRF, SHISA4, MGAT4B, SGCG, SRL, KCNQ4, PCDH19, TECTA, SNX1, SMPD2, PRRT2, NDUFAF5, OSBPL7, LANCL2, GNAI3, LRRC55, ART3, PLPP7, MSRA, MRC2, EHD2, OBSCN, MFN2, RFTN2, SPRED1, TMEM132A, YIPF1, TMEM236, YRDC, TREML1, UTRN, ZP2, QTRT1, TTC7B, TBC1D3, TBCD, TMEM41A, SEMA6B, SNTB1, SH2D3C, SCAMP5, SLC6A12, RYR1, SLAMF8, RUFY3, SNX6, SLCO2B1, TMEM204, SEMA5B, TEX261, SLC35B1, SLC35G2, TCTN3, UPK3A, ARHGEF12, ATG2B, GNAI1, JAM3, EHD1, EHD4, CKMT2, CYP2W1, ABCG2, ADCY7, CDH15, ADRA1A, B3GNT5, GNB5, ADGRF1, FAM126B, HTR1A, CAVIN4, CREB3L2, SLC2A4, GPR84, FGFRL1, HHATL, GABARAPL1, GPR39, FCGR2B, CHRNA1, CD248, FMNL3, GPAT2, ANKRD13A, CARMIL2, CYP4X1, DEPDC5, MALL, DAG1, GBP2, CAMK2B, LRRC37B, CDH2, CLEC2B, MBOAT7, LEPROTL1, ADGRL4, CLIC2, ABHD16A, CXCR1, FCGRT, ANKRD13B, B3GNT4, ABCG8, AIG1, CLN5, DMD, CDC42SE1, CD81, CDHR2, CLN3, ANK2, CNTNAP3, BST1, CAV1, CCR2, ANO9, CSF3R, SLC25A31, AP3S1, ATP1A2, CMKLR1, ATP2A2, BSN, CAV3, CPT1B, COX7B, CDH13, CD1D, ARRDC1, CIB1, ORAI1, AKAP6, ADGRG6, ADRB1, ASIC5, AP3S2, CFC1, ANO5, AP1S3, ASPHD1, BACE2, CNPPD1, CACNA1C, DAPP1, IBTK, ABCC5, SLC16A6, MYZAP, MFAP3L, NCAM1, GPR182, LIMS2, KCND1, KCNK5, MCUB, EHD3, GPR15, MLIP, IL18RAP, LZTR1, ALOX12, POMGNT1, PI4KA, OR10R2, LRRC24, MCEMP1, PRKCA, DES, DYSF, LRRK2,
   [0368] h. Tissue protected: Thyroid TMEM158, TCTN2, SLC30A4, SLC27A6, TMEM138, TECR, ARMCX2, CACNB2, TMEM100, STRA6, TRIM13, TMEM245, TM4SF18, UBE2J1, VPS33B, SLC22A15, SYT13, TRPV4, SLC25A17, TGFBR3, TMEM251, ALPL, SLITRK4, SLC6A14, TEX2, TLN2, PCDHB2, RNF144A, RTN3, SH3BP4, SCNN1D, SCD5, RDX, RNF145, SERINC3, NEGR1, BVES, TPO, TSPAN33, TRPV6, WIPI2, RHBDD2, RRAD, PIGU, GPIHBP1, LIN7A, UPK3BL2, PRICKLE1, KCNQ4, PCDH19, SNX1, SMPD2, OSBPL7, LANCL2, PSD3, GNAI3, LRRC55, PALM, PLPP7, MSRA, MRC2, SORD, OBSCN, MFN2, PORCN, SPRED1, YIPF1, YRDC, UTRN, ZDHHC8, QTRT1, SYTL3, TMEM128, TTC7B, TBC1D3, TBCD, TMEM41A, ZFYVE9, UPK3BL1, TNFRSF10C, RTP5, RUFY3, SLCO2B1, TMEM204, TEX261, SIGLEC9, TCTN3, ARHGEF12, C19orf18, C2CD2L, CHST3, GNAI1, JAM3, IYD, DUOX1, HTR7, EHD1, GPR37, EHD4, CYP2W1, ABCG2, B3GNT5, FYN, FKBP2, GNB5, CLCNKB, FAM126B, HTR1A, CLCNKA, CREB3L2, FGFRL1, GABARAPL1, ATRAID, FCGR2B, CD99, GLMP, FAM210A, FMNL3, ADGRE1, GPAT2, ANKRD13A, CARMIL2, FMO3, IPCEF1, CYP4X1, DEPDC5, MALL, DAG1, LPXN, CAMK2B, CDH2, ADGRL4, CLIC2, EPHB1, CXCR1, ANKRD13B, ABCG8, BCL2, CLN5, ANK2, BASP1, AAK1, CAV1, ANO9, AQP4, CMKLR1, ATP2A2, CRHR1, ARRDC1, CIB1, ORAI1, TMEM63B, ACKR2, AP1S3, C5AR1, CACNA1C, CDH16, CDH10, INTS2, AP3B2, CAVIN2, IBTK, MPP2, MTNR1B, MYZAP, NCAM1, GFRA2, KCNK5, GPR15, JAML, LZTR1, MFSD1, POMGNT1, PI4KA, SLC2A11, OR10R2, LRRC24, NCS1, PRKCA, GAA,
   [0369] i. Tissue protected: Pancreatic endocrine cells (Islets) SLC30A4, LRIG1, MAP1LC3A, ARMCX2, CACNB2, SCGN, TMEM245, UBE2J1, SYT13, TRPV4, SLC25A17, TGFBR3, ALPL, STX1A, TEX2, RNF144A, RTN1, RNF145, SCG3, NEGR1, POMGNT2, WIPI2, PTGDR2, RRAD, RAB3B, UCHL1, UPK3BL2, PRICKLE1, KCNQ4, SMPD2, PTPRN, LANCL2, PTH2R, GNAI3, LRRC55, KIRREL3, OBSCN, MFN2, NECAB2, SLC17A6, SPRED1, ATP6V1D, SV2A, YRDC, UTRN, ZDHHC8, TMEM69, TSPAN7, TTC7B, TNS2, TBC1D3, PLAUR, ZFYVE9, SLC30A8, PRNP, UPK3BL1, STK10, SCAMP5, SYP, RUFY3, SLCO2B1, SYT7, TMEM204, TEX261, MAPK10, SLC35G2, OPRD1, TSPAN2, SIGLEC9, ARHGEF12, ATG2B, C2CD2L, GNAI1, JAM3, HTR7, DLK1, FFAR2, FMO5, DGCR2, CYP2W1, CLTRN, B3GNT5, FKBP2, GNB5, GNAO1, CREB3L2, FAM169A, FGFRL1, CASR, CD99, FMNL3, ANKRD13A, CARMIL2, GBP2, CDH2, CXCR1, ABCG8, CLN5, CD81, ENO2, FXYD2, AMPH, ATP1A2, ATP2A2, CRHR1, CD1D, ARRDC1, ASIC5, CFC1, AP1S3, EPB41L3, GAD2, DAPP1, IBTK, MPP2, ABCC5, SLC16A6, GFRA2, KCND1, PI4KA, OR10R2, LRRC24, MDGA2, PRKCA, GPRIN1, GAA,
   [0370] j. Tissue protected: Pancreatic exocrine cells TCTN2, TMEM138, ARMCX2, CLEC10A, CD300C, TBC1D3D, TMEM100, STRA6, TMEM245, TM4SF18, UBE2J1, SELPLG, SYT13, ALPL, STIMATE, TEX2, SLC27A2, SH3BP4, SCD5, RDX, TMEM97, RNF145, SLC26A1, POMGNT2, TSPAN33, PCDHA4, RRAD, PIGU, KCNH8, MRGPRF, UPK3BL2, STYK1, ITGA9, SCUBE1, SNX1, SMPD2, PTH2R, GNAI3, LRRC55, PALM, PLPP7, MSRA, MRC2, SORD, OBSCN, SPRED1, ATP6V1D, TMEM72, UGT3A1, SLC3A1, VSIG10, VSTM5, YRDC, UTRN, ZDHHC8, UNC13D, TMEM128, TTC7B, TBC1D3, TMEM41A, PLAUR, TBC1D3E, ZFYVE9, TACSTD2, UPK3BL1, TNFRSF10C, SNTB1, SYCN, SCAMP5, RUFY3, SLCO2B1, SYT7, TMEM204, SLC4A4, SEC11C, TCTN3, ARHGEF12, CHST3, DTL, GGT1, GNAI1, CUZD1, GLRB, KIRREL2, FA2H, ADCY7, B3GNT5, CYSTM1, FKBP2, ADGRF1, CREB3L2, EVI2A, FGFRL1, EPHX1, FCGR2B, CD248, FAM210A, FMNL3, GPAT2, ANKRD13A, CARMIL2, FMO3, CYP4X1, MALL, DAG1, GBP2, LRRC37B, LEPROTL1, BCL2, CLN5, CDH9, CDC42SE1, CD81, CLN3, ACE2, CNTNAP3, CFTR, CLDN10, SLC25A31, FXYD2, CMKLR1, BSN, CTSL, ARRDC1, CIB1, CHST4, AP1S3, ASPHD1, ALG14, DAPP1, CAVIN2, IBTK, ABCC1, MPP2, LRFN5, MYZAP, NCAM1, GFRA2, MCUB, POMGNT1, SLC2A11, OR10R2, PRKCA, LRRK2, GAA,
[0371] 9. Cancer treated: cervical cancer
   [0372] a. Tissue protected: Colon TRDN, TTYH3, TMED6, TMEM158, SCN4B, TMEM138, SLC7A6, DST, MAP1LC3A, CACNB2, CCND1, FCAMR, GABARAPL2, SCGN, SLC14A1, TMEM106B, UBE2J1, SLC47A1, SNTG2, SYT13, PCSK5, PIM1, ALPL, SLC22A16, STX1A, RAB17, SNX24, ENPP1, SMIM24, SLC38A9, SUSD3, PITPNM1, SLC27A2, SPIRE1, SIRPB1, MGAM, ARHGAP5, BVES, PILRA, PAG1, MUC12, TPCN1, PTPRD, ITGB1, KLRG1, DLC1, PLCB3, PCDHA4, RECK, SLC25A20, PVR, RNF144B, RAB3B, PSCA, KCNH8, MRGPRF, SEL1L3, TPSG1, TRPM7, SLC18A1, SLC25A36, SPATA9, STYK1, MAPKAP1, SLC9A3, ITLN1, PTGDR, ADCYAP1R1, PCDHB15, SNX7, SYNGR4, SLC11A1, MPC2, PEX10, MGLL, OSBPL7, ABCB1, PCDH11X, ITPR2, MFSD11, CNEP1R1, OBSCN, UGT2B4, TMEM72, SLC3A1, TMEM132A, VSIG10, TMEM236, SLC7A7, UST, ZP2, QTRT1, TMEM128, TMEM41A, PLAUR, ZFYVE9, RINT1, TMEM86A, SLC46A2, C2orf88, SPHK1, SCAMP5, RAB27A, SYP, PIGZ, PTPRN2, SLC6A12, RUFY3, SNX6, VTI1B, SLC38A5, SLC25A23, SEC11C, SUSD1, PHLPP2, ARHGAP21, REEP4, TMEM154, VASN, TCTN3, TRPC6, TMEM39B, ACVR1B, EFHD1, GGT1, DPEP1, FKRP, FCER1A, GREB1, SLC2A12, KCNMB3, CX3CR1, SLC48A1, CLEC16A, FCER1G, CLCA1, DAB2, DCBLD1, CADM4, ADGRF1, RASGRP2, CLN6, FGFRL1, CALN1, DMTN, FXYD6, ADGRA3, CHODL, CA4, CD1E, HHAT, DEPDC5, LRRC37B, CPTP, HSD17B2, MAGI1, MAN1C1, AP3M1, CDK14, ABHD16A, CXCR1, ANKRD13B, AQP1, CDC42EP5, MPP1, GAL3ST2, AP1S2, APOBR, CLN3, ACE2, SH3BP5, ANPEP, ATP9A, CNTNAP3, ENPEP, SLC25A31, CLDN11, KCNIP3, ADCK5, ATP1A2, CADPS, ASIC5, ACVRL1, ARL4C, ANXA13, BBS1, TMEM37, CHST5, ARHGEF4, EPB41L3, ABHD12, ADGRV1, ATP8B1, BCL2L13, EBP, ATG9A, PAM, ALG14, CASD1, B3GAT1, CYP2C9, DIP2A, IBTK, ABCC5, HMOX1, SLC9A3R2, NFASC, LRFN5, MYZAP, LFNG, LHFPL2, KCNN3, MS4A18, NDUFS1, GPR153, MS4A12, GFRA2, KIAA2013, NIPAL1, IGFLR1, IL17RA, LY9, GPA33, RPS6KC1, LZTR1, ALOX12, MUC13, NFXL1, MRAP, MT-ND4, NEU4, OR10R2, MRC1, NDUFB9, KLRC3, GPR63, NDST2,
   [0373] b. Tissue protected: Lung VSIG4, SLC30A4, SLC7A6, DST, EFNB3, CACNB2, SLC14A1, TRIM13, UBE2J1, SLC22A15, SLC25A17, TGFBR3, RAB17, SUSD3, RNF144A, SPIRE1, BVES, AGER, PAG1, VAT1, SLC18A2, IL10RB, RECK, SLC25A20, REEP2, RNF144B, PTPRG, SLC25A36, STX5, MPC2, MXRA7, MGLL, OSBPL7, ITPR2, KIRREL3, MFSD11, OBSCN, CD84, QTRT1, RINT1, TMEM86A, RHOG, PSD4, RUFY3, VTI1B, STEAP1, PHLPP2, REEP4, ACVR1B, GJB4, SLC48A1, CD247, FCER1G, CCR7, CYB5A, SLC44A2, DAB2, AOC3, DCBLD1, ECEL1, FGFRL1, CALN1, DMTN, CCDC88A, AIFM2, FES, AP3M1, CXCR1, ANKRD13B, AQP1, ABCA8, APBB1IP, FCAR, ELMO2, AQP4, ENPEP, CACNA2D2, ACE, ADCK5, BSN, CACNA1C, CXCR3, CAVIN2, IBTK, LAMP3, LFNG, GK, LDLRAD2, GALNT13, MRAP, PI4KA, NSMF, SLC34A2, LRRK2,
   [0374] c. Tissue protected: Skin TRDN, TTYH3, TMED6, SCN4B, SUN3, TMEM138, DST, CACNB2, CCND1, ACER3, GABARAPL2, SLC47A1, SOX10, SNTG2, SLC25A17, TGFBR3, ALPL, RAB17, ENPP1, SLC6A1, PITPNM1, SPIRE1, SIRPB1, TMEM97, ARHGAP5, NEGR1, SLC26A9, VAT1, IL10RB, REEP2, RNF144B, KCNH8, GPIHBP1, STX5, STYK1, MAPKAP1, SLC9A3, PCDHB15, SNX7, SLC11A1, MXRA7, MGLL, LANCL2, ITPR2, LAX1, F2R, DMPK, OBSCN, RMC1, SLC7A7, TMEM260, ZP2, TMEM128, TMEM86A, C2orf88, SPHK1, VTI1B, SLC38A5, SLC19A1, ARHGAP21, REEP4, TRPC6, TMEM39B, CYBA, GJB4, GABBR1, FA2H, CLEC16A, DSP, DAB2, CACNA2D1, DCBLD1, FYN, FGFRL1, CALN1, DMTN, FAT2, FXYD6, ADGRA3, CD99, CD248, HCN1, MALL, GSDMA, LRRC37B, AP3M1, CDK14, B3GNT4, DSG1, ABCA8, CLTCL1, APOBR, SLC25A31, ADCK5, MS4A1, CAV3, CD1D, ASPRV1, ASIC5, TMEM63B, ADGRV1, ATP8B1, BCL2L13, CLEC2A, ATP12A, PAM, IBTK, ABCC5, NFASC, MYZAP, LFNG, GPR153, NIPAL1, LDLRAD2, RPS6KC1, ALOX12, PI4KA, OR10R2, NDUFB9, NCS1, TRDN, TCTN2, SLC30A4, APLNR, TRIM13, UBE2J1, SYT13, SLC22A16, SLC38A9, SUSD3, TYR, TPCN1, DLC1, PLN, SEL1L3, KCNQ4, MPC2, OSBPL7, SLC25A15, UST, QTRT1, DCT, RINT1, RHOG, RUFY3, PMEL, SEMA5B, PHLPP2, TCTN3, FCER1A, GREB1, KCNMB3, IGSF3, CYB5A, EVI2A, CYB561A3, FCGR2B, GLMP, GPAT2, DNER, FGD2, CPTP, CXCR1, ELMO2, ATP9A, CDH13, BBS1, AP4E1, ATG2A, CACNA1C, ALG14, ADGRA1, CAVIN2, MPP2, LHFPL2, MUC21, NDUFS1, GFRA2, IL17RA, KIT, LZTR1, KIAA0040, MRAP, MT-ND4, GPR63, ,
   [0375] d. Tissue protected: Liver VNN1, TRDN, TTYH3, SLC13A5, SCN4B, TMEM138, DST, MAP1LC3A, APLNR, CACNB2, CCND1, CREB3L3, FCAMR, GABARAPL2, SLC14A1, TRIM13, UBE2J1, SLC47A1, SYT13, PCSK5, SLC25A17, PIM1, ALPL, SLC22A16, RAB17, SNX24, ENPP1, SYNE3, SLC38A9, SUSD3, RNF144A, SLC25A40, SLC27A2, SLCO1B3, SPIRE1, SLCO1B1, SIRPB1, SLC27A5, NEGR1, PAG1, TPCN1, VAT1, SLC18A2, PTPRD, RECK, SLC25A20, RNF144B, RDH16, LIN7A, SEL1L3, SLC25A36, STX5, KCNQ4, MAPKAP1, PCDHB15, SYNGR4, MPC2, PRRT2, MGLL, ABCB1, ITPR2, NAT8, PNPLA3, KIRREL3, MFSD11, MME, SLC25A15, OBSCN, UGT2B4, SLC3A1, TMEM132A, TFR2, TMEM260, TMEM128, TNS2, RINT1, TMEM86A, ST7L, C2orf88, SPHK1, SLC6A12, RUFY3, VTI1B, SLCO2B1, TEX261, ARHGAP21, TSPAN2, VASN, ACVR1B, GGT1, FKRP, FCER1A, EVA1A, GPR37, GREB1, KCNMB3, CX3CR1, SLC48A1, CLEC16A, CYP2D6, CYB5A, GJA5, CACNA2D1, CACNA1A, FYN, GAS2, CADM4, SLC2A2, RASGRP2, CREB3L2, CYP2A7, HEPACAM, FGFRL1, FOLH1, CYP1A2, DMTN, FXYD6, ADGRA3, CYP3A4, CYP2A6, CD1E, HHAT, DEPDC5, MALL, KCNJ16, ABCB4, NINJ1, CYP2C8, LRRC37B, CDH2, FES, GPAM, HSD17B2, MAL2, MAN1C1, AP3M1, CDK14, CYP2C19, BCL2L10, AQP9, ABCA8, AP1S2, ANPEP, ENPEP, ASGR1, ADRA2B, ABCB11, ADCK5, ATP1A2, CMKLR1, CYP2A13, ASIC5, TMEM63B, BBS1, HSD11B1, ADGRV1, ATP8B1, BACE2, EBP, ASGR2, ATG2A, PIK3AP1, CYP3A43, B3GAT1, INTS2, CAVIN2, CYP2C9, IBTK, SLC9A3R2, NFASC, MADCAM1, MYZAP, LFNG, LHFPL2, MFAP3L, LIMS2, NDUFS1, KCND1, GPR15, GK, NIPAL1, IGFLR1, IL17RA, LDLRAD2, SLC2A8, RPS6KC1, LZTR1, ALOX12, MRAP, PI4KA, OR10R2, NDUFB9, ABCC2, DPP4, GPR63, LRRK2, NDST2, SLC10A1, NPC1L1,
   [0376] e. Tissue protected: Kidney (glomeruli) SCN4B, TMEM138, DST, CACNB2, ACER3, SLC14A1, UBE2J1, SLC22A15, SLC47A1, MAPT, SYT13, SLC25A17, TGFBR3, RAB17, SYNE3, SUSD3, SLC45A1, RNF144A, SPIRE1, SIRPB1, MGAM, KIRREL1, PILRA, IL10RB, ITGB1, RECK, PVR, PTPRG, MRGPRF, SEL1L3, TPSG1, SLC25A36, STX5, SCUBE1, PTGDR, ADCYAP1R1, SLC11A1, MPC2, PLA2R1, MGLL, PTH2R, ITPR2, PNPLA3, F2R, KIRREL3, NOS3, MME, NKD1, NPHS2, RMC1, TSPAN7, TTC7B, TNS2, ZFYVE9, TMEM86A, C2orf88, STK10, SNCA, PSD4, SLC6A12, SNX6, VTI1B, SLC38A5, THSD7A, PITPNM3, PTPRO, SREBF1, VASN, EFHD1, EVA1A, HYAL2, CX3CR1, DAB2, DCBLD1, FYN, GAS2, CD93, FAM107A, ADGRF1, RASGRP2, EVI2A, CALN1, DMTN, ENG, CD99, CD248, DOCK8, CR1, FGD2, MAS1, ADGRL4, AQP1, CLN3, ELMO2, ENPEP, CHRM1, ADCK5, BSN, CDH13, ATP8B1, CACNA1C, PAM, BBS7, B3GAT1, SLC9A3R2, LIMS2, GPR153, ITGA8, LDLRAD2, LZTR1, NFXL1, NPHS1, KIAA0040, MRAP, PI4KA, NEU4, DYSF, DPP4, PDGFRA,
   [0377] f. Tissue protected: Kidney (tubules) TMEM231, VNN1, TRDN, TTYH3, TMED6, SCN4B, SUN3, TRPM3, TMEM138, TBC1D3G, TREH, DST, APLNR, CACNB2, CCND1, ACER3, FCAMR, GABARAPL2, THY1, SLC14A1, UBE2J1, SLC22A15, SLC47A1, MAPT, TMEM240, PCSK5, PIM1, ALPL, SLC22A16, RAB17, ENPP1, SMIM24, SYNE3, SLC5A12, SLC5A2, SUSD3, STIMATE, SLC12A1, PCDHB2, PITPNM1, RNF144A, SLC25A40, SLC27A2, SLC4A10, SCNN1D, SPIRE1, SIRPB1, SLC6A19, S1PR2, SLC34A3, NAV3, MGAM, ARHGAP5, SLC28A2, RDH11, NEGR1, PTH1R, KIRREL1, AGER, TPCN1, VAT1, VHL, PTPRD, IL10RB, RHBDD2, DLC1, PLCB3, PCDHA4, RECK, SLC25A20, PVR, RALB, RNF144B, PSCA, KCNH8, LIN7A, MRGPRF, SEL1L3, UCHL1, TRPM7, SLC25A36, STX5, STYK1, KCNQ4, MAPKAP1, SLC9A3, PTGDR, ADCYAP1R1, SNX7, SLC11A1, NOS1, MPC2, PEX10, PRRT2, MGLL, OSBPL7, ABCB1, ITPR2, NAT8, PNPLA3, PANX2, PLCD4, KIRREL3, MFSD11, CNEP1R1, NTRK2, MME, SLC25A15, OBSCN, RFTN2, UGT2B4, ATP6V1D, SLC22A6, TMEM72, XPNPEP2, SLC3A1, TMEM132A, VSIG10, ATP6V0A4, SLC7A7, TMEM260, UST, ZP2, QTRT1, TMEM252, TMEM128, TMEM174, TTC7B, TMEM41A, PLAUR, ZFYVE9, RINT1, TMPRSS2, TMEM86A, SLC46A2, SLC28A1, SEMA6B, SIRT2, SLC22A2, C2orf88, SPHK1, RHOG, SCAMP5, SLC22A8, PIGZ, SLC6A12, RUFY3, SNX6, SLC6A18, SLC13A2, TMEM213, VTI1B, SLC38A5, SLC5A1, SLC4A4, SLC25A23, SEC11C, TEX261, SREBF1, ARHGAP21, REEP4, SLC35G2, OPRD1, TSPAN2, VASN, TSPAN16, TMEM39B, ENPP6, EMC4, ACVR1B, EFHD1, GGT1, IYD, DPEP1, ENPP3, CUBN, CLSTN2, DLK1, FKRP, FCER1A, EVA1A, GABBR1, GREB1, HYAL2, KCNMB3, KIRREL2, CX3CR1, SLC48A1, CLEC16A, FCER1G, CKMT2, CPNE6, CYB5A, CLTRN, SLC44A2, GJA5, DAB2, CPT1C, DCBLD1, GAS2, CADM4, FAM107A, SLC2A2, CLCNKB, ADGRG5, CLCNKA, CLN6, CREB3L2, EVI2A, FAM169A, FGFRL1, CASR, FOLH1, DMTN, FXYD6, ADGRA3, CD248, CLIC4, FRRS1L, CA4, CD1E, HHAT, DEPDC5, GLIPR1L2, LPXN, KIAA0319, KCNJ16, LRRC37B, CDH2, FES, CPTP, MAL2, MAGI1, MAN1C1, AP3M1, CDK14, ABHD16A, BSND, BCL2L10, CXCR 1, AQP6, AQP1, DSG1, ABCA8, CDC42EP5, CLTCL1, NPR3, MPP1, AP1S2, CDC42SE1, SH3BP5, ANPEP, ATP9A, ENPEP, SLC7A9, CLDN10, SLC25A31, FXYD2, ACE, ADCK5, CATIP, CMKLR1, BSN, CAV3, CPT1B, ASIC5, TMEM63B, ACVRL1, ARL4C, ANO5, ANXA13, BBS1, TMEM37, ARHGEF4, AP4E1, EPB41L3, ADGRV1, ATP8B1, EBP, ATP12A, ATG9A, PIK3AP1, CACNA1C, CYP3A43, B3GAT1, INTS2, DIP2A, IBTK, MPP2, ABCC5, HMOX1, MYZAP, LFNG, LHFPL2, KCNJ10, KCNJ12, MFAP3L, NDUFS1, GFRA2, KCND1, KCNK5, GK, MS4A4A, KIAA2013, NIPAL1, IGFLR1, IL17RA, FMO1, LDLRAD2, RPS6KC1, LRP2, LZTR1, ALOX12, NFXL1, NPHS1, KIAA0040, MRAP, MT-ND4, MFSD1, NXPE2, PI4KA, IL23R, OR10R2, MRC1, GRIN2D, NDUFB9, NSMF, ABCC2, LRRC24, KCTD8, DYSF, DPP4, GPR63, LRRK2, NDST2, NPC1L1,
   [0378] g. Tissue protected: Heart (cardiomyocytes) TTYH3, TMED6, TCTN2, SLC30A4, SCN4B, SPAG4, TMEM138, SLC7A6, UCP3, DST, EFNB3, APLNR, CACNB2, GABARAPL2, RASL10B, SLC14A1, TMEM106B, SLC22A15, SLC47A1, MAPT, SYT13, PCSK5, SLC25A17, TGFBR3, SLC22A16, RAB17, SNX24, SUSD3, PITPNM1, RNF144A, SLC4A10, SPIRE1, SIRPB1, SGCB, NEGR1, BVES, PAG1, TPCN1, PTPRD, IL10RB, P2RY6, RECK, SLC25A20, PLN, PVR, RNF144B, GPIHBP1, MRGPRF, SEL1L3, SHISA4, INPP5D, FLT1, SLC25A36, SPATA9, SGCG, KCNQ4, MAPKAP1, SLC9A3, PCDHB15, SNX7, MPC2, MXRA7, PPP1R3A, PRRT2, OSBPL7, LANCL2, ITPR2, MFSD11, CNEP1R1, DMPK, S LC25A15, OBSCN, RFTN2, TMEM132A, TMEM236, SLC7A7, UST, TREML1, ZP2, QTRT1, TTC7B, TMEM41A, RINT1, TMEM86A, SEMA6B, SIRT2, C2orf88, SPHK1, SCAMP5, RAB27A, PIGZ, SLC6A12, RYR1, RUFY3, SNX6, VTI1B, SLCO2B1, SLC25A23, SUSD1, SEMA5B, ST8SIA2, TEX261, ARHGAP21, SLC35G2, ST8SIA5, VASN, TCTN3, TRPC6, TMEM39B, FKRP, FCER1A, EVA1A, GABBR1, GREB1, MMP27, KCNMB3, CX3CR1, CLEC16A, CKMT2, DSP, CACNA2D1, CDH15, ADRA1A, DCBLD1, CADM4, ADGRF1, RASGRP2, CAVIN4, CLN6, CREB3L2, FGFRL1, HHATL, CALN1, CYB561A3, FCGR2B, FXYD6, CHRNA1, ADGRA3, CD248, FXYD7, GPAT2, FGD2, CD1E, HHAT, DEPDC5, MALL, CAMK2B, KCNJ16, LRRC37B, CDH2, FES, MBOAT7, CPTP, LEPROTL1, MAN1C1, ADGRL4, AP3M1, CDK14, ABHD16A, CXCR1, FCGRT, ANKRD13B, B3GNT4, DMD, AP1S2, CDC42SE1, CLN3, CNTNAP3, CSF3R, SLC25A31, ADCK5, ATP1A2, CMKLR1, BSN, CADPS, CAV3, CPT1B, CDH13, CD1D, AKAP6, ADRB1, ASIC5, ARL4C, ANO5, BBS1, ARHGEF4, AP4E1, ATP8B1, BCL2L13, BACE2, ATG9A, CACNA1C, PAM, IBTK, ABCC5, NFASC, MYZAP, LFNG, LHFPL2, MFAP3L, NCAM1, GPR182, LIMS2, NDUFS1, KCND1, KCNK5, GPR15, GK, IGFLR1, LDLRAD2, SLC2A8, IL18RAP, RPS6KC1, LZTR1, ALOX12, NFXL1, MRAP, MT-ND4, PI4KA, OR10R2, NDUFB9, LRRC24, MCEMP1, DES, DYSF, GPR63, LRRK2, NDST2,
   [0379] h. Tissue protected: Thyroid TMED6, TMEM158, TCTN2, SLC30A4, SCN4B, TMEM138, DST, APLNR, CACNB2, GABARAPL2, TMEM100, TMEM106B, TRIM13, UBE2J1, VPS33B, SLC22A15, SLC47A1, SYT13, PCSK5, SLC25A17, TGFBR3, TMEM251, PIM1, ALPL, S LC22A16, SLITRK4, RAB17, SNX24, ENPP1, PCDHB2, RNF144A, SCNN1D, SPIRE1, SIRPB1, ARHGAP5, NEGR1, BVES, TPO, PAG1, TPCN1, VHL, IL10RB, RHBDD2, SLC25A20, PVR, RNF144B, GPIHBP1, LIN7A, SEL1L3, INPP5D, KCNQ4, MAPKAP1, PCDHB15, SNX7, SLC11A1, MPC2, MXRA7, MGLL, OSBPL7, LANCL2, PSD3, ITPR2, MFSD11, CNEP1R1, NTRK2, SLC25A15, OBSCN, SLC7A7, TMEM260, UST, QTRT1, TMEM128, TTC7B, TMEM41A, ZFYVE9, RINT1, TMEM86A, RTP5, SPHK1, SLC26A4, RUFY3, VTI1B, SLCO2B1, SLC25A23, SUSD1, TEX261, SREBF1, ARHGAP21, REEP4, TCTN3, TMEM39B, C19orf18, ACVR1B, EFHD1, IYD, FCER1A, EVA1A, GABBR1, GPR37, GREB1, CX3CR1, SLC48A1, CLEC16A, FCER1G, DAB2, DCBLD1, FYN, CADM4, CLCNKB, RASGRP2, CLCNKA, CLN6, CREB3L2, FGFRL1, CALN1, DMTN, FCGR2B, FXYD6, ADGRA3, CD99, GLMP, GPAT2, FGD2, CD1E, HCN1, IPCEF1, DEPDC5, MALL, LPXN, CAMK2B, KCNJ16, CDH2, FES, MAGI1, ADGRL4, AP3M1, CDK14, CXCR1, ANKRD13B, CLTCL1, ELMO2, AAK1, ATP9A, AQP4, ENPEP, ADCK5, CMKLR1, CRHR1, TMEM63B, ACVRL1, ARL4C, BBS1, ARHGEF4, AP4E1, ADGRV1, ATP8B1, CACNA1C, INTS2, CAVIN2, IBTK, MPP2, NFASC, MYZAP, LFNG, LHFPL2, NCAM1, NDUFS1, GFRA2, KCNK5, GPR15, GK, IGFLR1, IL17RA, LZTR1, MRAP, MT-ND4, MFSD1, PI4KA, OR10R2, GRIN2D, NDUFB9, LRRC24, NCS1, GPR63, NDST2,
   [0380] i. Tissue protected: Pancreatic endocrine cells (Islets) SLC30A4, SCN4B, MAP1LC3A, CACNB2, ACER3, SCGN, UBE2J1, MAPT, SYT13, SLC25A17, TGFBR3, PIM1, ALPL, STX1A, RAB3A, PITPNM1, RNF144A, RTN1, SCG3, ARHGAP5, NEGR1, POMGNT2, PAG1, TPCN1, VAT1, VHL, IL10RB, SLC25A20, PVR, RAB3B, UCHL1, SLC25A36, STX5, KCNQ4, MAPKAP1, PCDHB15, MPC2, MXRA7, PTPRN, LANCL2, PTH2R, KIRREL3, MFSD11, CNEP1R1, OBSCN, NECAB2, SLC17A6, ATP6V1D, SV2A, TSPAN7, TTC7B, TNS2, PLAUR, ZFYVE9, SLC30A8, RINT1, TMEM86A, STK10, SCAMP5, RAB27A, SYP, PTPRN2, RUFY3, VTI1B, SLC38A5, SLCO2B1, TEX261, MAPK10, ARHGAP21, SLC35G2, OPRD1, TSPAN2, VASN, TMEM39B, EMC4, DLK1, GREB1, DGCR2, KCNMB3, CLEC16A, CLTRN, GNAO1, CREB3L2, FAM169A, FGFRL1, CASR, FXYD6, ADGRA3, CD99, FKBP11, CDH2, MAGI1, CDK14, CXCR1, ENO2, ELMO2, ATP9A, CLU, FXYD2, ADCK5, AMPH, ATP1A2, CADPS, CRHR1, CD1D,ASIC5, ACVRL1, ARL4C, BBS1, ARHGEF4, EPB41L3, ADGRV1, ATP8B1, ATG9A, PAM, BBS7, GAD2, ALOX5, IBTK, MPP2, ABCC5, NFASC, LFNG, GNAZ, GPR153, GFRA2, KCND1, KIAA2013, IGFLR1, FMO1, LDLRAD2, MRAP, MT-ND4, PI4KA, OR10R2, NDUFB9, LRRC24, DPP4,
   [0381] j. Tissue protected: Pancreatic exocrine cells TMED6, TCTN2, SCN4B, TMEM138, GABARAPL2, RASL10B, TBC1D3D, TMEM100, UBE2J1, SYT13, PCSK5, PIM1, ALPL, SLC22A16, RAB17, ENPP1, SLC38A9, STIMATE, SLC27A2, SLC4A10, SPIRE1, SIRPB1, TMEM97, SEC16B, POMGNT2, PAG1, VAT1, VHL, IL10RB, PCDHA4, SLC25A20, PVR, RNF144B, PSCA, KCNH8, MRGPRF, SEL1L3, SLC25A36, SPATA9, STX5, STYK1, SCUBE1, PCDHB15, SNX7, MPC2, MXRA7, MGLL, PTH2R, NEURL1, ITPR2, MFSD11, CNEP1R1, OBSCN, ATP6V1D, TMEM72, SLC3A1, VSIG10, UST, UNC13D, TMEM128, TTC7B, TMEM41A, PLAUR, TBC1D3E, ZFYVE9, RINT1, TMPRSS2, C2orf88, SPHK1, SYCN, SCAMP5, RAB27A, RUFY3, VTI1B, SLC38A5, SLCO2B1, SLC4A4, SLC25A23, SEC11C, SLC19A1, SUSD1, ARHGAP21, REEP4, TCTN3, TMEM39B, ACVR1B, EFHD1, GGT1, DPEP1, CUZD1, EVA1A, GP2, SLC2A12, KIRREL2, FA2H, SLC48A1, CLEC16A, FCER1G, CYB5A, DSP, DAB2, CYSTM1, ADGRF1, RASGRP2, CLN6, CREB3L2, EVI2A, FGFRL1, FCGR2B, FXYD6, CD248, GPAT2, FKBP11, FGD2, CA4, HHAT, MALL, KCNJ16, LRRC37B, FES, MAGI1, LEPROTL1, MAN1C1, AP3M1, CDK14, AQP1, CDH9, AP1S2, CDC42SE1, CLN3, ACE2, ANPEP, CNTNAP3, CFTR, CLDN10, SLC25A31, FXYD2, ADCK5, CMKLR1, BSN, CADPS, CHST4, ARL4C, AP4E1, ADGRV1, ATP8B1, ATG9A, PIK3AP1, ALG14, BBS7, AQP12A, AQP12B, CAVIN2, IBTK, MPP2, LRFN5, MYZAP, LFNG, NCAM1, NDUFS1, GFRA2, KIAA2013, IGFLR1, IL17RA, RPS6KC1, NFXL1, MRAP, MT-ND4, OR10R2, NDUFB9, LRRK2, NDST2,
[0382] 10. Cancer treated: skin cancer
   [0383] a. Tissue protected: Colon TSPAN12, AXL, TBC1D9B, TSPAN3, SCN4B, SFT2D2, SNX4, SMAGP, TMEM74B, SLC7A6, TNFSF14, MAP1LC3A, ATP8B2, C2CD2, CORO7, ACY3, FCAMR, G ABARAPL2, MGAT4C, SLC46A1, SCGN, SLC14A1, TMEM106B, TM4SF18, UBE2J1, SLC47A1, SYT13, PIM1, PLPP2, SELENBP1, STX1A, TREM2, RAB17, SEZ6L2, SNX24, TMEM263, ENPP1, SMIM24, SUSD3, TMEM94, TNFRSF11A, NAAA, PITPNM1, SLC27A2, RHOA, SOCS7, SMIM1, PEX1, PLXNA1, PEMT, SLC25A33, SLC25A46, NPDC1, NTRK1, ARHGAP5, RNF5, MIEF2, PEX11G, HCRTR1, SRD5A3, NAGPA, NBEA, BVES, P2RX6, PAG1, PIGR, PLEKHA3, RGS16, MUC12, TPCN1, TVP23B, TSPAN33, TULP3, TFPI, TJP3, WSCD1, PTPRD, RAB27B, KLRG1, RAB20, DLC1, RASD2, PCDHA4, LMAN2, PIGU, RNF139, PSCA, MRGPRF, SERP1, SPCS3, TPSG1, TRPM7, UPK3BL2, SLC18A1, SLC25A36, SPATA9, SLCO4A1, SPPL3, SLC9A3, IFI27, ITLN1, PTGDR, ADCYAP1R1, SYNGR4, TAOK2, MITD1, MPC2, PEX10, MRGPRX2, CD46, ABCB1, MGAT1, PCDH11X, KCNK1, MYORG, POMT2, HEG1, ILDR1, LYPLA1, KCNQ1, MGAT4A, MFSD11, NAALADL2, CNEP1R1, DENND5B, OBSCN, TMEM159, LDLRAD3, AATK, MEGF8, PROM1, NUCB2, PRIMA1, UGT2B4, SERP2, TMEM72, TNFAIP8L3, SELENOT, VPS11, SLC3A1, SIGIRR, TMEM132A, VSIG10, SYT11, VPS28, SLC7A7, TVP23C, VAMP1, TM4SF20, TMEM143, UTRN, VPS35L, ZP2, VAC14, QTRT1, SYTL4, TMEM64, TBCD, TSPAN31, TMEM41A, UNC13B, PLAUR, ZFYVE9, SYTL2, TMEM53, UPK3BL1, SLC46A2, TSC2, SLC35A3, MCUR1, SEZ6, OCLN, RNF125, SPHK1, SLC28A3, SCAMP5, RAB27A, RNF103, SYP, SUSD6, PIGZ, PTPRN2, SLC6A12, RUFY3 , SLC6A15, SERINC1, SLC19A2, TGFBR1, VTI1B, SIGLEC14, TMEM204, MTG2, PPM1L, SLC25A23, NAPG, SRPRB, SEC11C, SUSD1, TECPR1, PRRT3, IMMT, SLC35E1, SLC35B1, ARHGAP27, NAPB, RNF186, TMEM154, TMIGD2, VASN, TCTN3, TRPC6, VPS41, UBL3, TMEM39B, ADCK2, ATG2B, CDHR5, ARL4D, ACVR1B, GGT1, DPEP1, HTR7, FKRP, FMO5, IL9R, GHR, GREB1, FKTN, SLC2A12, KCNMB3, KIFC3, FPR1, SLC48A1, FCER1G, GOLPH3, CYP2S1, DMXL2, ABCG2, ACSL5, CLCA1, FAM171A1, GLP2R, CEACAM1, GCNT3, B4GALT4, B3GNT5, CACNA1B, FPR2, DOK7, FKBP2, CHDH, ENTPD7, GNB5, ADGRF1, HTR1A, CLN6, EMC10, DGKE, GATM, FZD2, HLA-DQB1, FXYD6, AQP8, CLMN, CNTFR, COQ2, DIAPH1, ADGRE1, CDIPT, ELOVL1, WDPCP, CHODL, CA12, CA4, CD1E, C6orf89, CERS4, HHAT, DEPDC5, HRH1, GNG11, DGKQ, LRRC37B, CTDNEP1, CPTP, DGAT1, HSD17B2, LIME1, MAGI1, ENTPD8, FPGS, LPP, MALRD1, MAN1C1, AP3M1, CDK14, ABHD16A, CXCR1, FER1L6, ANO8, BEST2, ENTPD1, BRI3, CYP26B1, CDC42EP5, MPP1, GAL3ST2, HTR4, B3GNT8, KDELR3, FIBP, ELOVL7, ERBIN, APOBR, CHPF2, CDHR2, SLC25A13, CRB3, ACE2, ANPEP, ATP9A, CNTNAP3, CDH17, CD300LF, CPM, SLC31A1, ATL2, CLCA4, CYB561, ALG2, SLC25A31, CLDN11, KCNIP3, ATP1A2, CADPS, ACKR3, COG8, ANKRD46, GRAMD1A, ARRDC1, ATRN, ADGRG6, ASIC5, ADGRL1, B3GNT6, CEACAM6, ACVRL1, BBS5, ACKR2, ARL4C, ANO1, ANXA13, BBS1, CHST5, ARHGEF4, ASPHD1, EPB41L3, ABHD12, AGPS, BCL2L13, CDH26, C12orf66, ATG9A, BLNK, ALG14, CASD1, CHMP2B, CEACAM3, DAPP1, B3GAT1, CASQ1, UGT8, DIP2A, FGFR4, IBTK, ABCC5, SMPD4, HMOX1, SLC9A3R2, PDZD3, NCEH1, KCNA5, LRFN5, MYZAP, LFNG, LHFPL2, MS4A18, GIPC1, NDUFS1, MC4R, MS4A12, GLCE, GFRA2, MCUB, SLC16A9, MSTO1, GNG12, GLRA2, SLC2A6, KIAA2013, KCNK10, NIPAL1, NIPAL4, SLC16A10, IGFLR1, LY9, LYN, GPA33, DPY19L1, LZTR1, ALOX12, MUC13 , NOD2, HPS6, MYOC, ICA1, NEU4, OR10R2, SLC16A7, MRC1, SLC16A4, NDUFB9, KLRC3, ITSN1, PRKCA, PDLIM4, GPR63, PSKH1, NDST2,
   [0384] b. Tissue protected: Lung TSPAN12, TGM2, AXL, VSIG4, SLC30A4, SFT2D2, SMAGP, TMEM74B, SLC7A6, EFNB3, LRP1, CD300C, CHRM3, SLC14A1, TRIM13, UBE2J1, SLC22A15, TGFBR3, SELENBP1, TREM2, RAB17, SUSD3, RNF144A, RHOA, PLXNA1, RNF5, MIEF2, BVES, AGER, PAG1, PIGR, PLLP, TVP23B, TSPAN33, TFPI, TJP3, SLC18A2, RASD2, REEP2, PTPRG, SPCS3, MGAT4B, SLC25A36, STX5, MPC2, MRGPRX2, CD46, KCNK1, POMT2, KCNQ1, MFSD11, EHD2, OBSCN, CD84, VPS11, SIGIRR, TMEM80, TVP23C, UTRN, QTRT1, PTPRB, TMEM255B, SEZ6, OCLN, RNF125, RHOG, RNF103, SUSD6, RUFY3, SLC6A15, SLC19A2, VTI1B, STEAP1, NAPG, SRPRB, TECPR1, VPS41, UBL3, ATG2B, ACVR1B, EHD1, FKTN, EHD4, FPR1, SLC48A1, CD247, FCER1G, CCR7, CYB5A, SLC44A2, DMXL2, ACSL5, FAM171A1, AOC3, ECEL1, FKBP2, CLDN18, GNB5, DGKE, EPHX1, HCLS1, HLA-DQB1, COQ2, CDIPT, ELOVL1, CERS4, CCDC88A, AIFM2, FES, LIME1, AP3M1, CAPN2, CXCR1, ABCA8, APBB1IP, CHPF2, ANK2, AQP4, ATL2, CYB561, CACNA2D2, ACE, BSN, ADGRL1, CEACAM6, ASPHD1, CACNA1C, CADM1, DAPP1, CXCR3, CAVIN2, IBTK, NCEH1, LAMP3, LFNG, MC4R, EHD3, MSTO1, GK, LDLRAD2, GALNT13, HPS6, PI4KA, SLC16A7, SLC16A4, ITSN1, SLC34A2, PSKH1, LRRK2,
   [0385] c. Tissue protected: Skin SCN4B, SFT2D2, SMAGP, SUN3, TMEM74B, C2CD2, CD300C, CHRM3, GABARAPL2, MGAT4C, SLC47A1, TGFBR3, PLPP2, RAB17, TMEM263, ENPP1, SLC6A1, PITPNM1, PLXNA1, TMEM97, NPDC1, ARHGAP5, RNF5, MIEF2, SRD5A3, NEGR1, SLC26A9, RGS16, TULP3, TFPI, RAB27B, PIGU, REEP2, RNF139, SERP1, SPCS3, MGAT4B, TYROBP, STX5, PCDH19, SLC9A3, IFI27, TAOK2, MITD1, MGAT1, KCNK1, HEG1, NAALADL2, DMPK, OBSCN, AATK, SERP2, SELENOT, VPS11, VPS28, SLC7A7, YRDC, TMEM260, VAMP1, UTRN, ZP2, VAC14, TBCD, TMEM255B, TSC2, SLC35A3, OCLN, RNF125, SPHK1, SLC28A3, S1PR5, SUSD6, SLC19A2, VTI1B, TMEM204, SLC19A1, PRRT3, NAPB, TRPC6, VPS41, TMEM39B, ADCK2, CYBA, FFAR2, FA2H, FPR1, CYP2W1, DSP, DMXL2, GLP2R, ANO7, CACNA2D1, FPR2, FKBP2, GATM, ATRAID, FXYD6, CD99, CD248, COX14, ELOVL1, WDPCP, CA12, C6orf89, CERS4, HCN1, DGKQ, LRRC37B, CTDNEP1, EDNRB, DGAT1, LPP, MALRD1, AP3M1, CDK14, B3GNT4, ABCA8, BRI3, KDELR3, FIBP, ELOVL7, APOBR, CD81, SLC25A13, ANK2, CYB561, SLC25A31, MS4A1, CAV3, COG8, CD1D, ASPRV1, ASIC5, ADGRL1, TMEM63B, BBS5, ACKR2, ASPHD1, AGPS, BCL2L13, ATP12A, BLNK, DAPP1, IBTK, ABCC1, ABCC5, MYZAP, LFNG, GIPC1, MC4R, MCUB, SLC16A9, M STO1, GNG12, NIPAL1, NIPAL4, LDLRAD2, ALOX12, NOD2, PI4KA, OR10R2, SLC16A4, NDUFB9, NCS1, PSKH1, TSPAN12, TBC1D9B, TCTN2, SLC30A4, SCN4B, SNX4, CORO7, TRIM13, UBE2J1, SYT13, SUSD3, TNFRSF11A, TYR, PEMT, SLC25A33, NTRK1, NAGPA, PDGFC, PLLP, TPCN1, TSPAN33, TJP3, WIPI2, DLC1, MPP6, RASA4, SLCO4A1, SUSD4, KCNQ4, MPC2, CD46, MYORG, KCNQ1, DENND5B, SLC25A15, NUCB2, PRIMA1, SIGIRR, TMEM80, TMEM143, QTRT1, TMEM64, DCT, TSPAN31, UNC13B, PRNP, TMEM53, SNTB1, MCUR1, RHOG, RUFY3, SERINC1, RAB11FIP5, MTG2, NAPG, TECPR1, PMEL, ARHGAP27, TMIGD2, TCTN3, EHD1, GREB1, GSDMC, KCNMB3, KIFC3, EHD4, CYB5A, FAM171A1, B4GALT4, B3GNT5, CACNA1B, DOK7, EMC10, EVI2A, FZD2, CYB561A3, FCGR2B, CNTFR, GLMP, DIAPH1, ADGRE1, GPAT2, FGD2, HRH1, SLC2A5, CPTP, CXCR1, FNBP1, B3GNT8, ERBIN, CHPF2, ATP9A, SLC31A1, ATL2, ATRN, ANO1, BBS1, CPNE2, AP4E1, ATG2A, CACNA1C, ALG14, CHMP2B, CAVIN2, HAS3, NCEH1, KCNA5, LHFPL2, MUC21, NDUFS1, GLCE, GFRA2, EHD3, KIT, LZTR1, PDLIM4, GPR63,
   [0386] d. Tissue protected: Liver TSPAN12, VNN1, AXL, TBC1D9B, VDAC3, SCN4B, SFT2D2, SNX4, SMAGP, TNFSF14, UPK1B, LRP1, MAP1LC3A, C2CD2, CD300C, CREB3L3, CHRM3, ACY3, FCAMR, GABARAPL2, SLC14A1, TRIM13, TM4SF18, UBE2J1, SLC47A1, SYT13, PIM1, PLPP2, SELENBP1, TREM2, RAB17, SLC6A4, SNX24, ENPP1, SYNE3, SUSD3, TMEM94, NAAA, RNF144A, SLC25A40, SLC27A2, SLCO1B3, SLCO1B1, PLXNA1, PEMT, SLC25A33, SLC25A46, SLC25A43, SLC27A5, NPDC1, NTRK1, RNF5, PEX11G, SRD5A3, NAGPA, NEGR1, PAG1, PLEKHA3, TPCN1, TFPI, TJP3, SLC18A2, PTPRD, RAB27B, KSR2, RAB20, PTGDR2, LMAN2, PIGU, LIN7A, SERP1, SPCS3, MGAT4B, RASA4, SLC25A36, STX5, SPPL3, KCNQ4, PCDH19, SYNGR4, TAOK2, MITD1, MPC2, PRRT2, MRGPRX2, CD46, ABCB1, MGAT1, KCNK1, NAT8, MYORG, HEG1, MAGI2, ILDR1, LYPLA1, KCNQ1, MFSD11, DENND5B, SLC25A15, OBSCN, TMEM159, LDLRAD3, AATK, MEGF8, NUCB2, UGT2B4, SERP2, SELENOT, SLC3A1, SIGIRR, TMEM132A, YIPF1, TMEM260, VAMP1, UTRN, VPS35L, SYTL4, TMEM64, TNS2, TBCD, TSPAN31, UNC13B, ZDHHC13, PTPRB, TMEM53, TSC2, ST7L, OCLN, SPHK1, SUSD6, SLC6A12, SNX19, RUFY3, SERINC1, SLC19A2, TGFBR1, VTI1B, SLCO2B1, TMEM204, PPM1L, NAPG, SRPRB, TECPR1, TEX261, IMMT, SLC35E1, NAPB, TSPAN2, VASN, VPS41, TM4SF4, CDHR5, ACVR1B, GGT1, FKRP, FMO5, EVA1A, GHR, GPR37, GREB1, FKTN, KCNMB3, KIFC3, SLC48A1, CYP2W1, CYP2D6, CYB5A, CYP2S1, DMXL2, GJA5, ACSL5, FAM171A1, CACNA2D1, CEACAM1, B4GALT4, B3GNT5, CACNA1B, CACNA1A, FPR2, GAS2, DOK7, SLC2A2, CHDH, ENTPD7, HTR1A, CREB3L2, EMC10, CYP2A7, GATM, EPHX1, FZD2, FOLH1, CYP1A2, FXYD6, CNTFR, COQ2, COX14, CYP3A4, DIAPH1, CDIPT, CYP2A6, ELOVL1, CYP2B6, CD1E, CERS4, FMO3, HHAT, CYP4V2, DEPDC5, KCNJ16, NINJ1, CYP2C8, DHCR24, LRRC37B, CDH2, CTDNEP1, FES, KMO, DGAT1, HSD17B2, LIME1, MAL2, ENTPD8, MALRD1, MAN1C1, AP3M1, CDK14, CYP2C19, BCL2L10, AQP9, ENTPD1, ABCA8, BRI3, CYP26B1, FIBP, ERBIN, CHPF2, CDHR2, SLC25A13, CRB3, ANPEP, ASGR1, CPM, SLC31A1 , ADRA2B, ABCB11, ATP1A2, CMKLR1, CYP2A13, ACKR3, COG8, CYP2E1, GRAMD1A, ARRDC1, ATRN, ASIC5, ADGRL1, TMEM63B, ANO1, BBS1, ASPHD1, EPB41L5, AGPS, BACE2, CD320, ASGR2, ATG2A, CYP3A43, CHMP2B, DAPP1, B3GAT1, CASQ1, UGT8, INTS2, CAVIN2, FGFR4, IBTK, SMPD4, MOXD1, SLC9A3R2, MYZAP, LFNG, LHFPL2, MFAP3L, GIPC1, LIMS2, NDUFS1, GLCE, KCND1, SLC16A9, MSTO1, GPR15, GK, SLC2A6, NIPAL1, NIPAL4, IGFLR1, LDLRAD2, DPY19L1, SLC2A8, LZTR1, ALOX12, HPS6, PI4KA, ICA1, OR10R2, SLC16A4, NDUFB9, ITSN1, ABCC2, PDLIM4, DPP4, GPR63, PSKH1, LRRK2, NDST2, SLC10A1, NPC1L1,
   [0387] e. Tissue protected: Kidney (glomeruli) AXL, SCN4B, SFT2D2, SNX4, CORO7, MGAT4C, SLC14A1, TM4SF18, UBE2J1, SLC22A15, SLC47A1, SYT13, TGFBR3, TREM2, RAB17, SYNE3, SUSD3, TMEM94, SLC45A1, RNF144A, RHOA, PLXNA1, PEMT, PODXL, KIRREL1, PDGFC, P2RX6, PDGFRB, PLEKHA3, TVP23B, TSPAN33, TFPI, KSR2, RNF139, PTPRG, MRGPRF, SERP1, SPCS3, SLC34A1, TPSG1, SLC25A36, STX5, PTGDR, ADCYAP1R1, MPC2, PLA2R1, CD46, MGAT1, PTH2R, KCNK1, POMT2, MAGI2, MAST1, KCNQ1, MGAT4A, MAP6, NOS3, DENND5B, EHD2, MPP5, NKD1, LDLRAD3, NPHS2, SERP2, VPS11, SIGIRR, VPS28, TVP23C, UTRN, VPS35L, VAC14, TSPAN7, TTC7B, TNS2, ZFYVE9, TMEM255B, TMEM53, STK10, RNF125, SNCA, RNF103, SUSD6, SLC6A12, SLC19A2, VTI1B, THSD7A, NAPG, PTPRO, SLC35B1, NAPB, VASN, VPS41, ARL4D, HTR7, EHD1, EVA1A, HYAL2, EHD4, DMXL2, FAM171A1, CEACAM1, CACNA1B, GAS2, CD93, FAM107A, GNB5, ADGRF1, CD34, HTR1A, EMC10, EVI2A, FZD2, HLA-DQB1, ENG, CD99, CD248, DOCK8, ADGRE1, CR1, FGD2, HRH1, MAS1, LIME1, LPP, ADGRL4, CAPN2, ANO8, FNBP1, CRB3, ACKR1, ATL2, CLCA4, CHRM1, BSN, ATRN, ASPHD1, EPB41L5, AKAP12, CACNA1C, DAPP1, B3GAT1, ABCC1, SLC9A3R2, HAS3, KCNA5, GIPC1, LIMS2, ITGA8, SLC16A9, EHD3, MSTO1, GNG12, MLIP, NIPAL4, LDLRAD2, LZTR1, NPHS1, HPS6, PI4KA, NEU4, SLC16A7, SLC16A4, DYSF, DPP4, PSKH1, PDGFRA,
   [0388] f. Tissue protected: Kidney (tubules) TMEM231, TSPAN12, VNN1, AXL, TBC1D9B, TSPAN3, VDAC3, SCN4B, SFT2D2, SNX4, SMAGP, SUN3, TRPM3, TBC1D3G, TMEM74B, TREH, TNFSF14, ATP8B2, C2CD2, CORO7, CHRM3, ACY3, FCAMR, GABARAPL2, MGAT4C, THY1, SLC14A1, TM4SF18, UBE2J1, SLC22A15, SLC47A1, SELPLG, PIM1, PLPP2, SELENBP1, TREM2, RAB17, SLC6A4, SEZ6L2, TMEM263, ENPP1, SMIM24, SYNE3, SLC5A12, SLC5A2, SUSD3, TMEM94, STIMATE, SLC12A1, NAAA, PCDHB2, PITPNM1, RNF144A, SLC25A40, SLC27A2, SLC4A10, SCNN1D, RHOA, SMIM1, PEX1, PLXNA1, PEMT, SLC6A19, SLC22A11, S1PR2, SLC34A3, SLC25A33, SLC25A46, NAV3, NTRK1, ARHGAP5, RNF5, MIEF2, PEX11G, SLC28A2, HCRTR1, SRD5A3, RDH11, NAGPA, NEGR1, PTH1R, KIRREL1, PDGFC, NBEA, P2RX6, AGER, PIGR, RGS16, PLLP, TPCN1, TVP23B, TULP3, TFPI, TJP3, WSCD1, WIPI2, VHL, PTPRD, RAB27B, RAB20, DLC1, RASD2, MPP6, PCDHA4, PDE2A, LMAN2, PIGU, RALB, RNF139, PSCA, LIN7A, MRGPRF, UCHL1, SERP1, SPCS3, MGAT4B, SLC34A1, TRPM7, UPK3BL2, RASA4, SLC25A36, STX5, PRICKLE1, SLCO4A1, SPPL3, SUSD4, KCNQ4, PCDH19, SLC9A3, IFI27, PTGDR, ADCYAP1R1, MITD1, NOS1, MPC2, PEX10, PRRT2, CD46, ABCB1, MGAT1, KCNK1, NAT8, MYORG, PANX2, POMT2, HEG1, MAGI2, ILDR1, LYPLA1, KCNQ1, MGAT4A, ITPR1, MFSD11, NAALADL2, CNEP1R1, NTRK2, DENND5B, EHD2, MPP5, SLC25A15, OBSCN, TMEM159, LDLRAD3, AATK, MEGF8, PROM1, PRIMA1, UGT2B4, ATP6V1B1, SLC22A6, SERP2, TMEM72, TNFAIP8L3, SELENOT, VPS11, SLC3A1, SIGIRR, TMEM132A, VSIG10, YIPF1, VPS28, ATP6V0A4, SLC7A7, TMEM80, TMEM260, TVP23C, VAMP1, UTRN, VPS35L, ZP2, VAC14, QTRT1, SYTL4, TMEM252, TMEM174, TMEM64, TTC7B, TBCD, TSPAN31, TMEM41A, UNC13B, PLAUR, ZFYV E9, ZDHHC13, PTPRB, SYTL2, TMPRSS2, TMEM255B, TMEM53, FASLG, UPK3BL1, SLC46A2, TSC2, SLC28A1, SEMA6B, SNTB1, SIRT2, MCUR1, SLC22A2, OCLN, RNF125, SPHK1, RHOG, SLC28A3, SCAMP5, RNF103, SLC22A8, SLC13A3, SUSD6, PIGZ, SLC6A12, SNX19, RUFY3, RAB11FIP5, SLC19A2, SLC6A18, SLC13A2, TGFBR1, TMEM213, VTI1B, SLC5A1, SIGLEC14, SYT7, TMEM204, MTG2, TMEM184A, SLC4A4, SLC25A23, NAPG, SRPRB, SEC11C, TECPR1, TEX261, PKHD1, PRRT3, IMMT, SLC35E1, SLC35G2, OPRD1, NAPB, TRPV5, TSPAN2, TMIGD2, VASN, VPS41, UBL3, TMEM39B, ADCK2, ATG2B, CDHR5, ARL4D, ENPP6, EMC4, ACVR1B, GGT1, IYD, DPEP1, ENPP3, CUBN, CLSTN2, EHD1, FKRP, FMO5, EVA1A, GHR, GREB1, HYAL2, FKTN, GSDMC, KCNMB3, KIFC3, KIRREL2, EHD4, SLC48A1, FCER1G, CKMT2, CPNE6, CYB5A, JAKMIP1, CLTRN, CYP2S1, SLC44A2, DMXL2, GJA5, ACSL5, FAM171A1, B4GALT4, B3GNT5, CACNA1B, GAS2, DOK7, FAM107A, FNDC5, FKBP2, SLC2A2, CHDH, DOCK2, GNB5, CLCNKB, HTR1A, ADGRG5, CALCR, CLCNKA, CLN6, CREB3L2, EMC10, EVI2A, FAM169A, GATM, FZD2, ATRAID, CASR, FOLH1, HLA-DQB1, FXYD6, CLMN, CNTFR, CD248, COQ2, COX14, DIAPH1, ADGRE1, CDIPT, ELOVL1, WDPCP, FRRS1L, CYP2B6, CA12, CA4, CD1E, C6orf89, CERS4, FMO3, HHAT, CYP4V2, DEPDC5, HRH1, GNG11, GLIPR1L2, LPXN, DGKQ, KIAA0319, KCNJ16, DHCR24, LRRC37B, CDH2, CTDNEP1, FES, KMO, EDNRB, SLC2A5, LRFN4, CPTP, DGAT1, LIME1, MAL2, MAGI1, FPGS, LPP, MALRD1, MAN1C1, AP3M1, CDK14, ABHD16A, BSND, BCL2L10, CAPN2, CXCR1, ANO8, AQP6, ABCA8, BRI3, CYP26B1, CDC42EP5, NPR3, MPP1, HTR4, FIBP, ERBIN, CDC42SE1, CHPF2, CDHR2, SLC25A13, CRB3, ADAM28, ANK2, ANPEP, ATP9A, SLC7A9, CPM, CLDN10, DUSP15, SLC31A1, ATL2, CLCA4, ALG2, SLC25A31, FXYD2, ACE, CATIP, CMKLR1, BSN, ACKR3, CLDN2, CAV3, COG8, CPT1B, COX7B, ANKRD46, GRAMD1A, ARRDC1, ATRN, ASIC5, ADGRL1, TMEM63B, ACVRL1, BBS5, ACKR2, ARL4C, ANO1, ANXA1 3, BBS1, CPNE2, ARHGEF4, AP4E1, ASPHD1, EPB41L3, EPB41L5, AGPS, C12orf66, ATP12A, ATG9A, BLNK, C5AR1, CACNA1C, CYP3A43, CDH16, CHMP2B, CADM1, B3GAT1, CASQ1, UGT8, INTS2, DIP2A, FGFR4, IBTK, ABCC5, NLGN1, SMPD4, HMOX1, LRFN2, MOXD1, PDZD3, HAS3, NCEH1, KCNA5, MYZAP, LFNG, LHFPL2, KCNJ10, KCNJ12, MFAP3L, GIPC1, NDUFS1, MC4R, GLCE, GFRA2, KCND1, KCNK5, MCUB, SLC16A9, EHD3, MSTO1, GNG12, GK, MS4A4A, MLIP, SLC2A6, KIAA2013, KCNK10, NIPAL1, NIPAL4, SLC16A10, IGFLR1, FAM234B, FMO1, LDLRAD2, DPY19L1, LRP2, LZTR1, ALOX12, NPHS1, HPS6, MYOC, MFSD1, PI4KA, ICA1, IL23R, OR10R2, SLC16A7, MRC1, SLC16A4, GRIN2D, NDUFB9, ITSN1, ABCC2, LRRC24, MDGA2, KCTD8, PRKCA, PDLIM4, DYSF, DPP4, GPR63, PSKH1, LRRK2, NDST2, NPC1L1,
   [0389] g. Tissue protected: Heart (cardiomyocytes) TSPAN12, TGM2, AXL, TBC1D9B, TCTN2, TSPAN3, VDAC3, SLC30A4, SLC27A6, SCN4B, SMAGP, SPAG4, TMEM74B, SLC7A6, TNFSF14, UCP3, EFNB3, ATP8B2, CAP2, CD300C, GABARAPL2, MGAT4C, SLC46A1, SLC14A1, TMEM106B, SLC22A15, SLC47A1, SYT13, TGFBR3, PLPP2, TREM2, RAB17, SEZ6L2, SNX24, SUSD3, TMEM94, NAAA, PITPNM1, RNF144A, SLC4A10, RHOA, PEX1, PLXNA1, SGCB, PEMT, SLC25A33, NPDC1, NTRK1, MIEF2, PEX11G, SRD5A3, NAGPA, NEGR1, BVES, P2RX6, PAG1, PLEKHA3, TPCN1, TVP23B, TSPAN33, TFPI, TJP3, WSCD1, PTPRD, RAB20, POPDC2, MPP6, P2RY6, MRGPRF, SERP1, SPCS3, SHISA4, INPP5D, MGAT4B, FLT1, RASA4, SLC25A36, SPATA9, SGCG, SLCO4A1, SRL, KCNQ4, PCDH19, SLC9A3, MITD1, MPC2, PRRT2, CD46, MGAT1, KCNK1, ART3, MYORG, POMT2, MAGI2, ILDR1, LYPLA1, KCNQ1, MGAT4A, ITPR1, MFSD11, CNEP1R1, DENND5B, DMPK, EHD2, SLC25A15, OBSCN, TMEM159, AATK, MEGF8, NUCB2, PRIMA1, SERP2, SIPA1, RYR2, SELENOT, VPS11, SIGIRR, TMEM132A, YIPF1, SLC7A7, YRDC, TVP23C, TMEM143, TREML1, UTRN, VPS35L, ZP2, VAC14, QTRT1, TMEM64, TTC7B, TBCD, TSPAN31, TMEM41A, ZDHHC13, PTPRB, TSC2, SEMA6B, SNTB1, SIRT2, SPHK1, SCAMP5, RAB27A, RAB11FIP4, SUSD6, PIGZ, SLC6A12, SNX19, SLAMF8, RUFY3, SERINC1, SLC19A2, TGFBR1, VTI1B, SLCO2B1, TMEM204, MTG2, PPM1L, SLC25A23, NAPG, SRPRB, SUSD1, TECPR1, TEX261, IMMT, SLC35B1, SLC35G2, NAPB, ST8SIA5, VASN, TCTN3, TRPC6, VPS41, UBL3, TMEM39B, ATG2B, EHD1, FKRP, EVA1A, GREB1, MMP27, FKTN, KCNMB3, EHD4, FPR1, CKMT2, CYP2W1, GOLPH3, CYP2S1, DSP, DMXL2, ABCG2, FAM171A1, CACNA2D1, CDH15, ADRA1A, B4GALT4, B3GNT5, CACNA1B, DOK7, FNDC5, CHDH, GNB5, ADGRF1, HTR1A, CAVIN4, CLN6, CREB3L2, EMC10, SLC2A4, DGKE, HHATL, FZD2, CYB561A3, HLA-DQB1, FCGR2B, FXYD6, CHRNA1, CNTFR, CD248, CDIPT, ELOVL1, WDPCP, GPAT2, FGD2, CD1E, C6orf89, CERS4, HHAT, CYP4V2, DEPDC5, HRH1, DGKQ, CAMK2B, KCNJ16, LRRC37B, CDH2, CTDNEP1, FES, MBOAT7, CPTP, DGAT1, LIME1, LEPROTL1, LPP, MALRD1, MAN1C1, ADGRL4, AP3M1, CDK14, ABHD16A, CXCR1, FCGRT, ANO8, B3GNT4, ENTPD1, B3GNT8, FIBP, DMD, ELOVL7, ERBIN, CDC42SE1, CD81, CHPF2, CDHR2, SLC25A13, ADAM28, ANK2, CNTNAP3, SLC31A1, CSF3R, ATL2, CL CA4, CYB561, ALG2, SLC25A31, ATP1A2, CMKLR1, BSN, CADPS, ACKR3, CCR4, CAV3, COG8, CPT1B, COX7B, ANKRD46, CD1D, ARRDC1, AKAP6, ADGRG6, ADRB1, ASIC5, BBS5, ARL4C, ANO1, BBS1, CPNE2, ARHGEF4, AP4E1, ASPHD1, BCL2L13, BACE2, ATG9A, BLNK, CACNA1C, DAPP1, CASQ1, UGT8, IBTK, JPH1, ABCC5, NLGN1, SMPD4, NCEH1, KCNA5, MYZAP, LFNG, LHFPL2, MFAP3L, NCAM1, GIPC1, GPR182, LIMS2, NDUFS1, MC4R, GLCE, KCND1, KCNK5, MCUB, SLC16A9, EHD3, MSTO1, GPR15, GK, MLIP, NIPAL4, SLC16A10, IGFLR1, LDLRAD2, DPY19L1, SLC2A8, IL18RAP, LZTR1, ALOX12, NOD2, PI4KA, ICA1, OR10R2, SLC16A4, NDUFB9, ITSN1, LRRC24, MCEMP1, PRKCA, PDLIM4, DES, DYSF, GPR63, PSKH1, LRRK2, NDST2,
   [0390] h. Tissue protected: Thyroid TSPAN12, TBC1D9B, TCTN2, TSPAN3, SLC30A4, SLC27A6, SCN4B, SFT2D2, SNX4, SMAGP, TMEM74B, TNFSF14, ATP8B2, C2CD2, CHRM3, GABARAPL2, SLC46A1, TMEM100, TMEM106B, TRIM13, TM4SF18, UBE2J1, VPS33B, SLC22A15, SLC47A1, SYT13, TGFBR3, TMEM251, PIM1, PLPP2, SELENBP1, SLITRK4, TREM2, RAB17, SNX24, TMEM263, ENPP1, TMEM94, TNFRSF11A, NAAA, PCDHB2, RNF144A, SCNN1D, RHOA, SMIM1, PEX1, PLXNA1, PEMT, SLC25A33, SLC25A46, NPDC1, NTRK1, ARHGAP5, RNF5, MIEF2, PEX11G, SRD5A3, NAGPA, NEGR1, KCNQ5, NBEA, BVES, TPO, PAG1, PLEKHA3, RGS16, TPCN1, TVP23B, TSPAN33, TULP3, TFPI, TJP3, WSCD1, WIPI2, VHL, RAB20, RASD2, MPP6, LMAN2, PIGU, RNF139, LIN7A, SERP1, SPCS3, INPP5D, UPK3BL2, PRICKLE1, SLCO4A1, SUSD4, KCNQ4, PCDH19, IFI27, TAOK2, MITD1, MPC2, CD46, KCNK1, PSD3, POMT2, HEG1, MAGI2, ILDR1, LYPLA1, MAST1, KCNQ1, MGAT4A, MFSD11, CNEP1R1, NTRK2, DENND5B, SLC25A15, OBSCN, TMEM159, LDLRAD3, AATK, MEGF8, PROM1, NUCB2, PORCN, PRIMA1, SERP2, SELENOT, VPS11, SIGIRR, YIPF1, VPS28, SLC7A7, YRDC, TMEM80, TMEM260, TVP23C, UTRN, VPS35L, VAC14, QTRT1, SYTL4, TTC7B, TBCD, TSPAN31, TMEM41A, UNC13B, ZFYVE9, TMEM255B, TMEM53, FASLG, UPK3BL1, TNFRSF10C, TSC2, RTP5, MCUR1, OCLN, RNF125, SPHK1, RNF103, SLC26A4, SUSD6, SNX19, RUFY3, SERINC1, SLC19A2, VTI1B, RNFT2, SLCO2B1, TMEM204, MTG2, PPM1L, SLC25A23, NAPG, SRPRB, SUSD1, TECPR1, TEX261, PRRT3, IMMT, SLC35E1, TRPV5, TMIGD2, TCTN3, VPS41, UBL3, TMEM39B, ADCK2, C19orf18, ACVR1B, IYD, DUOX1, HTR7, EHD1, EVA1A, GHR, GPR37, GREB1, FKTN, KIFC3, EHD4, SLC48A1, FCER1G, CYP2W1, GOLPH3, CYP2S1, DMXL2, ABCG2, FAM171A1, B3GNT5, FPR2, DOK7, FKBP2, GNB5, CLCNKB, EPHX4, HTR1A, CLCNKA, CLN6, CREB3L2, EMC10, FCRL1, DGKE, GATM, FZD2, ATRAID, HLA-DQB1, FCGR2B, FXYD6, CD99, CLMN, CNTFR, GLMP, COQ2, COX14, DIAPH1, ADGRE1, CDIPT, ELOVL1, WDPCP, GPAT2, FGD2, CD1E, C6orf89, CERS4, HCN1, FMO3, IPCEF1, DEPDC5, LPXN, DGKQ, CAMK2B, KCNJ16, CDH2, CTDNEP1, FES, SLC2A5, DGAT1, LIME1, MAGI1, MALRD1, ADGRL4, AP3M1, CDK14, FZD5, CAPN2, CXCR1, FER1L6, ANO8, ENTPD1, FNBP1, FIBP, ERBIN, CHPF2, SLC25A13, CRB3, ANK2, AAK1, ATP9A, AQP4, CLCA4, CYB561, ALG2, CMKLR1, CRHR1, ACKR3, COG8, ANKRD46, ARRDC1, ATRN, ADGRL1, TMEM63B, ACVRL1, BBS5, ACKR2, ARL4C, BBS1, CPNE2, ARHGE F4, AP4E1, AKAP12, AGPS, CDH26, CD320, C12orf66, BLNK, C5AR1, CACNA1C, CDH16, CDH10, CHMP2B, CEACAM3, CADM1, ARFGAP3, UGT8, INTS2, AP3B2, CAVIN2, IBTK, NLGN1, SMPD4, MTNR1B, NCEH1, KCNA5, MYZAP, LFNG, LHFPL2, NCAM1, GIPC1, NDUFS1, MC4R, GLCE, GFRA2, KCNK5, SLC16A9, MSTO1, GNG12, GPR15, GK, SLC2A6, NIPAL4, IGFLR1, LYN, FAM234B, LZTR1, HPS6, MFSD1, PI4KA, ICA1, OR10R2, SLC16A4, GRIN2D, NDUFB9, LRRC24, NCS1, PRKCA, PDLIM4, GPR63, PSKH1, NDST2,
   [0391] i. Tissue protected: Pancreatic endocrine cells (Islets) TSPAN12, TBC1D9B, TSPAN3, VDAC3, SLC30A4, SCN4B, SFT2D2, SNX4, SMAGP, STXBP1, TNFSF14, MAP1LC3A, CHRM3, SCGN, UBE2J1, SYT13, TGFBR3, PIM1, PLPP2, STX1A, TREM2, SEZ6L2, NAAA, RAB3A, PITPNM1, RNF144A, RHOA, SMIM1, PLXNA1, RTN1, PEMT, SLC25A33, SLC25A46, NPDC1, NTRK1, SCG3, ARHGAP5, RNF5, MIEF2, HCRTR1, SRD5A3, NEGR1, NBEA, POMGNT2, PAG1, RGS16, TPCN1, TVP23B, TFPI, TJP3, WSCD1, WIPI2, VHL, RAB20, RASD2, MPP6, PTGDR2, RNF139, UCHL1, SERP1, SPCS3, UPK3BL2, SLC25A36, STX5, PRICKLE1, SPPL3, KCNQ4, TAOK2, MITD1, MPC2, PTPRN, CD46, PTH2R, KCNK1, MYORG, POMT2, HEG1, MAGI2, ILDR1, MGAT4A, MFSD11, CNEP1R1, OBSCN, TMEM159, AATK, NECAB2, NUCB2, SLC17A6, ATP6V1B1, SERP2, SHISAL2B, VPS11, SV2A, YRDC, TVP23C, VAMP1, TM4SF20, UTRN, VAC14, SYTL4, TSPAN7, TMEM64, TTC7B, TNS2, TSPAN31, UNC13B, PLAUR, ZFYVE9, ZDHHC13, SLC30A8, PRNP, TMEM255B, TMEM53, FASLG, UPK3BL1, TSC2, SLC35A3, STK10, RNF125, SCAMP5, RAB27A, RNF103, SYP, PTPRN2, SNX19, RUFY3, SLC19A2, VTI1B, SLCO2B1, SIGLEC14, SYT7, TMEM204, PPM1L, NAPG, SRPRB, TECPR1, TEX261, MAPK10, PRRT3, IMMT, SLC35G2, OPRD1, NAPB, TSPAN2, VASN, VPS41, TMEM39B, ATG2B, EMC4, HTR7, FFAR2, FMO5, GREB1, DGCR2, KCNMB3, CYP2W1, GOLPH3, CLTRN, DMXL2, FAM171A1, B4GALT4, B3GNT5, CACNA1B, DOK7, FKBP2, GNB5, GNAO1, CREB3L2, FAM169A, FBXO2, CASR, FXYD6, AQP8, CD99, CLMN, CNTFR, COQ2, DIAPH1, CDIPT, ELOVL1, WDPCP, CYP2B6, FKBP11, C6orf89, CERS4, CYP4V2, DGKQ, CDH2, CTDNEP1, MAGI1, MALRD1, CDK14, CAPN2, CXCR1, FIBP, CD81, CHPF2, SLC25A13, ENO2, ATP9A, CLU, ATL2, CYB561, ALG2, FXYD2, AMPH, ATP1A2, CADPS, CRHR1, ACKR3, COG8, ANKRD46, CD1D, ARRDC1, ATRN, ASIC5, ADGRL1, ACVRL1, BBS5, ARL4C, BBS1, ARHGEF4, EPB41L3, EPB41L5, CDH26, ATG9A, CADM1, GAD2, DAPP1, ARFGAP3, ALOX5, FGFR4, IBTK, ABCC5, NLGN1, SMPD4, LFNG, GNAZ, GIPC1, MC4R, GLCE, GFRA2, KCND1, MSTO1, KIAA2013, IGFLR1, FMO1, LDLRAD2, HPS6, PI4KA, ICA1, OR10R2, NDUFB9, LRRC24, MDGA2, PRKCA, PDLIM4, DPP4, PSKH1,
   [0392] j. Tissue protected: Pancreatic exocrine cells TSPAN12, AXL, TBC1D9B, TCTN2, VDAC3, SCN4B, SFT2D2, SMAGP, TNFSF14, ATP8B2, C2CD2, CD300C, CORO7, CHRM3, GABARAPL2, SLC46A1, TBC1D3D, TMEM100, TM4SF18, UBE2J1, SELPLG, SYT13, PIM1, PLPP2, TREM2, RAB17, SEZ6L2, TMEM263, ENPP1, TMEM94, STIMATE, NAAA, SLC27A2, SLC4A10, RHOA, SMIM1, PEX1, PLXNA1, PEMT, TMEM97, SLC25A33, SLC25A46, NTRK1, SEC16B, RNF5, MIEF2, SRD5A3, PDGFC, NBEA, POMGNT2, PAG1, PLEKHA3, RGS16, PLLP, TVP23B, TSPAN33, TFPI, TJP3, WSCD1, VHL, RAB27B, RASD2, MPP6, PCDHA4, LMAN2, PIGU, RNF139, PSCA, MRGPRF, SERP1, SPCS3, UPK3BL2, SLC25A36, SPATA9, STX5, SLCO4A1, SUSD4, IFI27, MITD1, MPC2, MRGPRX2, CD46, MGAT1, PTH2R, NEURL1, KCNK1, MYORG, POMT2, HEG1, LYPLA1, KCNQ1, MGAT4A, MFSD11, CNEP1R1, DENND5B, OBSCN, TMEM159, LDLRAD3, AATK, MEGF8, PROM1, NUCB2, PRIMA1, SERP2, TMEM72, TNFAIP8L3, SELENOT, VPS11, SLC3A1, SIGIRR, VSIG10, YRDC, TMEM80, TVP23C, VAMP1, UTRN, VAC14, SYTL4, UNC13D, TTC7B, TRAT1, TSPAN31, TMEM41A, UNC13B, PLAUR, TBC1D3E, ZFYVE9, ZDHHC13, PTPRB, SYTL2, TMPRSS2, TMEM255B, TMEM53, FASLG, UPK3BL1, TNFRSF10C, SNTB1, OCLN, RNF125, SPHK1, SYCN, SLC28A3, SCAMP5, RAB27A, RNF103, SUSD6, SNX19, RUFY3, SERINC1, RAB11FIP5, SLC19A2, VTI1B, SLCO2B1, SYT7, TMEM204, MTG2, SLC4A4, SLC25A23, NAPG, SRPRB, SEC11C, SLC19A1, SUSD1, TECPR1, PKHD1, IMMT, ARHGAP27, NAPB, TRPV5, TCTN3, TM4SF4, TMEM39B, ADCK2, ARL4D, ACVR1B, GGT1, DPEP1, CUZD1, EVA1A, GHR, FKTN, GP2, SLC2A12, KIFC3, KIRREL2, FA2H, SLC48A1, FCER1G, CYB5A, GOLPH3, DSP, DMXL2, ACSL5, FAM171A1, B4GALT4, B3GNT5, CACNA1B, FPR2, DOK7, FKBP2, CHDH, ADGRF1, CLN6, CREB3L2, EMC10, DGKE, EVI2A, FBXO2, GATM, EPHX1, FZD2, FCGR2B, FXYD6, AQP8, CLMN, CNTFR, CD248, COQ2, COX14, DIAPH1, CDIPT, ELOVL1, WDPCP, GPAT2, FKBP11, FGD2, CA12, CA4, CERS4, FMO3, HHAT, CYP4V2, DGKQ, KCNJ16, LRRC37B, CTDNEP1, FES, DGAT1, LIME1, MAGI1, FPGS, LEPROTL1, MALRD1, MAN1C1, AP3M1, CDK14, FZD5, BRI3, CYP26B1, HTR4, KDELR3, FIBP, ELOVL7, ERBIN, CDC42SE1, CD81, CHPF2, SLC25A13, CRB3, ADAM28, ACE2, ANPEP, CNTNAP3, CFTR, CLDN10, ATL2, CLCA4, CYB561, ALG2, SLC25A31, FXYD2, CMKLR1, BSN, CADPS, ACKR3, CCR4, AQP5, COG8, ANKRD46, ARRDC1, ADGRL1, BBS5, C HST4, ARL4C, AP4E1, ASPHD1, AGPS, C12orf66, ATG9A, ALG14, CHMP2B, CADM1, DAPP1, ARFGAP3, CASQ1, AQP12A, AQP12B, CAVIN2, FGFR4, IBTK, ABCC1, SMPD4, MOXD1, NCEH1, KCNA5, LRFN5, MYZAP, LFNG, NCAM1, GIPC1, NDUFS1, MC4R, GLCE, GFRA2, MCUB, SLC16A9, MSTO1, GNG12, SLC2A6, KIAA2013, KCNK10, SLC16A10, IGFLR1, LYN, FAM234B, NOD2, HPS6, MYOC, ICA1, OR10R2, SLC16A7, NDUFB9, PRKCA, PDLIM4, PSKH1, LRRK2, NDST2,
[0393] 11. Cancer treated: endometrial cancer
   [0394] a. Tissue protected: Colon TRDN, TMED6, TMEM158, UGT2A3, TMEM138, SLC7A6, TMEM60, MAP1LC3A, CD36, MGAT4C, SCGN, SLC14A1, TMEM106B, UBE2J1, SNTG2, TMEM135, PIM1, STBD1, STX1A, ENPP1, SMIM24, SUSD3, SOCS7, NTRK3, RAC1, PCDHGA10, SLC26A1, HCRTR1, PPP1R16B, BVES, LDLR, PILRA, RAC3, MUC12, KLRG1, PARVB, DLC1, PLCB3, PCDHA4, SDR16C5, RDH13, RECK, PTPRT, RAB28, PSCA, KCNH8, MRGPRF, SEL1L3, TMEM45A, SERP1, TPSG1, UPK3BL2, SLC18A1, SPATA9, SPPL3, MAPKAP1, SLC9A3, PTGDR, ADCYAP1R1, SYNGR4, PRKN, ABCB1, MYORG, PLPPR2, PLPP7, SLC8A1, OBSCN, UGT2B4, SERP2, TMEM72, SLC3A1, UGT2B17, VSIG10, SLC7A7, TMEM106C, TMEM143, VAMP5, UTRN, VPS35L, UGT2B28, ZP2, QTRT1, TMEM128, TMEM253, TOMM40L, TBCD, UNC13B, PLAUR, SYTL2, PRRG2, TMX2, UGT2B15, UPK3BL1, SCAMP5, RAB43, SYP, PIGZ, PTPRN2, SLC39A2, SLC39A14, SLC6A15, SNX6, TGFBR1, SLC38A5, SEC11C, PHLPP2, SCN7A, REEP4, MSMO1, ARHGAP27, NAPB, TSNARE1, TRAF3IP3, TMEM154, TYRO3, UBL3, TMEM39B, CDHR5, EFHD1, DPEP1, EMC9, GSDMB, IGSF8, CX3CR1, FPR1, GRAP, PHKA1, ABCG1, CYP2S1, ABCG2, GPC5, CD177, CLCA1, DAB2, GLP2R, FPR2, CADM4, ENTPD7, RASGRP2, CLN6, ENOX2, CALN1, DMTN, AQP8, CHODL, CA4, DEPDC5, GDAP1, DGKQ, IGSF11, CPTP, HSD17B2, LIME1, SLC7A8, LPP, MAN1C1, ABHD16A, CXCR1, EPHA10, FER1L6, ANO8, ANKRD13B, AQP1, BEST2, BRI3, CDC42EP5, MPP1, GAL3ST2, B3GNT8, KDELR3, FAM162A, DENND5A, ACE2, SH3BP5, CNTNAP3, CDH17, CD300LF, AFG1L, ENPEP, SLC25A31, CLDN11, KCNIP3, ATP1A2, CADPS, CD300A, ADGRG6, B3GNT6, CEACAM6, TMEM30B, DCXR, ACKR2, AP1S3, CMTM8, EPB41L3, ABHD12, BCL2L13, C12orf66, CNPPD1, COMTD1, HSD3B7, ALG14, CEACAM3, B3GAT1, CASQ1, PYCARD, CYP2C9, DIP2A, HMOX1, SLC16A6, KCNN3, MS4A18, GPR153, MS4A12, GFRA2, MCUB, KIAA2013, LY9, GPA33, DPY19L1, ALOX12, MUC13, NOD2, OR10R2, MRC1, KLRC3, MAPK8IP1,
   [0395] b. Tissue protected: Lung VSIG4, SLC30A4, SLC7A6, CD300C, SLC14A1, TRIM13, UBE2J1, VIPR2, SLC22A15, SLC25A17, TGFBR3, SUSD3, SLC26A1, NUS1, PPP1R16B, BVES, AGER, SLC18A2, PCDH10, SDR16C5, RECK, PTPRT, RAB28, PTPRG, MGAT4B, EHD2, OBSCN, VAMP5, UTRN, QTRT1, PRRG2, RHOG, PSD4, RAB43, SLC39A2, SLC6A15, STEAP1, PHLPP2, SCN7A, REEP4, SIGLEC9, UBL3, EHD1, GJB4, EHD4, FPR1, CD247, CCR7, CYB5A, ABCG1, CAVIN1, GPC5, DAB2, AOC3, ECEL1, CLDN18, CALN1, HCLS1, DMTN, CCDC88A, AIFM2, CLEC2B, FES, LIME1, CLIC2, CAPN2, CXCR1, ANKRD13B, AQP1, DGKZ, ABCA8, APBB1IP, FAM162A, FCAR, ELMO2, CAV1, ENPEP, CACNA2D2, ACE, AP3S1, BSN, CAV2, AP3S2, CEACAM6, CMTM8, COMTD1, BDKRB2, CXCR3, LAMP3, EHD3, MAP1LC3B, NSMF, LRRK2,
   [0396] c. Tissue protected: Skin TRDN, TMED6, SUN3, TMEM138, CLEC10A, CD300C, MGAT4C, PERP, VIPR2, RXFP1, SOX10, SNTG2, TMEM135, SLC25A17, TGFBR3, ENPP1, TMPRSS11D, SLC6A1, RAC1, SLC26A1, NEGR1, NUS1, PPP1R16B, SLC26A9, RAC3, TMEM40, MTMR2, SDR16C5, RDH13, RAB28, KCNH8, LTBR, TMEM45A, SERP1, MGAT4B, TYROBP, SLC10A6, MAPKAP1, SLC9A3, LANCL2, PLPP7, LAX1, LYPD3, KRT1, SLC8A1, DMPK, OBSCN, SERP2, TRPM2, TMEM79, SLC7A7, YRDC, VAMP5, UTRN, ZP2, TMEM128, TBCD, PRRG2, TMX2, UGT2B15, S1PR5, SLC39A2, NGFR, SLC38A5, LY6D, REEP4, MSMO1, NAPB, RIPK4, TSNARE1, SIGLEC9, TRAF3IP3, TYRO3, TMEM39B, EMC9, CYBA, GJB4, FFAR2, IGSF8, FA2H, FPR1, GRAP, PHKA1, CYP2W1, ABCG1, DSP, CAVIN1, GPC5, CD177, DAB2, GLP2R, ANO7, FYN, FPR2, ENOX2, ATRAID, CALN1, DMTN, FAT2, CAPNS2, HCN1, MALL, GDAP1, DGKQ, DSC3, SLC7A8, LPP, EPHA10, B3GNT4, DSG1, ABCA8, BRI3, KDELR3, BST1, CAV1, AFG1L, SLC25A31, MS4A1, CAV2, CAV3, CD1D, ASPRV1, TMEM63B, DSG3, TMEM30B, DCXR, ACKR2, BCL2L13, CLEC2A, CNPPD1, COMTD1, ATP12A, HSD3B7, GPR153, MCUB, MAP1LC3B, ALOX12, NOD2, CHL1, OR10R2, NCS1, TRDN, SLC30A4, TRIM13, UBE2J1, ULBP3, SUSD3, TYR, RHBG, DLC1, PLN, PTPRT, SEL1L3, ICAM3, MYORG, PLPPR2, TMEM143, QTRT1, DCT, UNC13B, PRNP, RHCG, SH2D3C, RHOG, S100A8, PMEL, SEMA5B, PHLPP2, ARHGAP27, EHD1, GSDMC, EHD4, CYB5A, TM7SF2, CYB561A3, FCGR2B, FAM210A, GPAT2, CD82, DNER, FGD2, IGSF11, CLEC2B, CPTP, CXCR1, DGKZ, PROCR, B3GNT8, FAM162A, ELMO2, AP3S1, CDH13, AP3S2, CMTM8, ATG2A, BDKRB2, ALG14, ADGRA1, PYCARD, MPP2, HAS3, LHFPL6, MUC21, GFRA2, EHD3, KIT, KIAA0040, MAPK8IP1, ,
   [0397] d. Tissue protected: Liver VNN1, TRDN, TMEM138, MAP1LC3A, CLEC10A, CD300C, CREB3L3, SLC14A1, TRIM13, UBE2J1, TMEM135, SLC25A17, PIM1, STBD1, SLC6A4, ENPP1, SUSD3, SLC25A40, SLCO1B3, SLCO1B1, NTRK3, SLC27A5, SLC26A1, NEGR1, PPP1R16B, LDLR, SLC18A2, KSR2, MTMR2, PTGDR2, RDH13, RECK, PTPRT, RDH16, LIN7A, SEL1L3, TMEM45A, SERP1, MGAT4B, SPPL3, MAPKAP1, SYNGR4, PRRT2, ABCB1, NAT8, MYORG, PLPPR2, PNPLA3, SLC8A1, MME, OBSCN, UGT2B4, SERP2, SLC3A1, TFR2, TMEM106C, VAMP5, UTRN, VPS35L, TMEM128, TNS2, TBCD, UNC13B, TMX2, UGT2B15, ST7L, RAB43, SLC39A2, SLC39A14, TGFBR1, SLCO2B1, MSMO1, NAPB, TSNARE1, SIGLEC9, TYRO3, CDHR5, GSDMB, EVA1A, GPR37, GLRB, CX3CR1, CYP2W1, CYP2D6, CYB5A, ABCG1, CYP2S1, GJA5, CD177, CACNA1A, FYN, FPR2, GAS2, CADM4, SLC2A2, ENTPD7, RASGRP2, CREB3L2, CYP2A7, HEPACAM, CYP1A2, DMTN, CYP3A4, FAM210A, CYP2A6, CYP2B6, FMO3, CYP4V2, DEPDC5, MALL, ABCB4, NINJ1, CYP2C8, DHCR24, CLEC2B, FES, HSD17B2, LIME1, MAL2, MAN1C1, CYP2C19, BCL2L10, AQP9, ABCA8, BRI3, AFG1L, ENPEP, ASGR1, ADRA2B, ABCB11, ATP1A2, CYP2A13, TMEM63B, TMEM30B, DCXR, CMTM8, BACE2, ASGR2, ATG2A, PIK3AP1, CYP3A43, HSD3B7, B3GAT1, CASQ1, CYP2C9, MADCAM1, SLC16A6, MFAP3L, LIMS2, GPR15, DPY19L1, SLC2A8, ALOX12, OR10R2, ABCC2, LRRK2, SLC10A1, NPC1L1,
   [0398] e. Tissue protected: Kidney (glomeruli) ZDHHC16, TMEM138, ZAP70, MGAT4C, SLC14A1, UBE2J1, VIPR2, KDR, S LC22A15, TMEM135, SLC25A17, TGFBR3, SUSD3, SLC45A1, RAC1, PILRA, RAC3, KSR2, PARVB, PCDH10, RECK, PTPRT, RAB28, PTPRG, MRGPRF, SEL1L3, SERP1, SLC34A1, TPSG1, PTGDR, ADCYAP1R1, PLA2R1, PRKN, PTH2R, PNPLA3, NOS3, EHD2, MME, NKD1, NPHS2, SERP2, VAMP5, UTRN, VPS35L, TSPAN7, TNS2, PRRG2, STK10, SNCA, PSD4, SNX6, SLC38A5, PITPNM3, PTPRO, SREBF1, SCN7A, RTL1, NAPB, TYRO3, EFHD1, EHD1, EVA1A, HYAL2, CX3CR1, EHD4, CAVIN1, GPC5, DAB2, FYN, GAS2, CD93, CD34, RASGRP2, CALN1, DMTN, ENG, DOCK5, FAM210A, FGD2, CLEC2B, LIME1, LPP, ADGRL4, CLIC2, CAPN2, ANO8, AQP1, ELMO2, CAV1, AFG1L, ENPEP, BSN, CAV2, CDH13, BBS7, B3GAT1, HAS3, SLC43A2, LIMS2, GPR153, ITGA8, EHD3, MLIP, MAP1LC3B, NPHS1, KIAA0040, PDGFRA,
   [0399] f. Tissue protected: Kidney (tubules) VNN1, TRDN, TMED6, SUN3, TRPM3, TMEM138, TBC1D3G, TREH, MGAT4C, THY1, SLC14A1, UBE2J1, VIPR2, SLC22A15, SELPLG, TMEM135, TMEM240, PIM1, SLC6A4, ENPP1, SMIM24, SLC5A12, SLC5A2, SUSD3, STIMATE, SLC12A1, SLC25A40, SLC4A10, SCNN1D, SLC6A19, SLC22A11, SLC34A3, NTRK3, SLC26A1, SLC28A2, HCRTR1, RDH11, NEGR1, PPP1R16B, PTH1R, LDLR, AGER, RHBG, PARVB, RHBDD2, DLC1, PLCB3, PCDHA4, PCDH10, PDE2A, RDH13, RECK, PTPRT, RALB, RAB28, PSCA, KCNH8, LIN7A, MRGPRF, SEL1L3, LTBR, TMEM45A, SERP1, MGAT4B, SLC34A1, UPK3BL2, SPPL3, MAPKAP1, SLC9A3, PTGDR, ADCYAP1R1, NOS1, PRRT2, PRKN, ABCB1, NAT8, MYORG, PLPPR2, PNPLA3, PLPP7, SLC8A1, NTRK2, EHD2, MME, OBSCN, NKAIN4, RFTN2, UGT2B4, SLC22A6, SERP2, TMEM72, TRPM2, UGT3A1, XPNPEP2, SLC3A1, VSIG10, ATP6V0A4, SLC7A7, TMEM106C, VAMP5, UTRN, VPS35L, ZP2, QTRT1, TMEM252, TMEM128, TMEM174, TOMM40L, TBCD, UNC13B, PLAUR, RHCG, SYTL2, PRRG2, TMPRSS2, TMX2, UPK3BL1, SLC28A1, SEMA6B, SIRT2, SLC22A2, SH2D3C, RHOG, SCAMP5, RAB43, SLC22A8, SLC13A3, PIGZ, SLC39A2, SLC39A14, SNX6, SLC6A18, SLC13A2, TGFBR1, TMEM213, SLC38A5, SLC5A1, SLC4A4, SEC11C, SREBF1, REEP4, SLC35G2, MSMO1, OPRD1, NAPB, RIPK4, TSNARE1, TYRO3, TSPAN16, UBL3, TMEM39B, CDHR5, ENPP6, EFHD1, IYD, DPEP1, EMC9, CUBN, CLSTN2, EHD1, GSDMB, EVA1A, IGSF8, HYAL2, GLRB, GSDMC, KIRREL2, CX3CR1, EHD4, GRAP, CKMT2, PHKA1, CPNE6, CYB5A, ABCG1, CLTRN, CYP2S1, GJA5, GPC5, CD177, DAB2, FAM151A, CPT1C, GAS2, CADM4, SLC2A2, DOCK2, CLCNKB, ADGRG5, CLCNKA, CLN6, CREB3L2, ENOX2, TM7SF2, ATRAID, CASR, DMTN, FAM210A, FRRS1L, CYP2B6, CA4, FMO3, CYP4V2, DEPDC5, GDAP1, GLIPR1L2, LPXN, DGKQ, KIAA0319, IGSF11, DHCR24, CLEC2B, FES, CPTP, LIME1, SLC7A8, MAL2, LPP, MAN1C1, EPHB1, ABHD16A, BSND, BCL2L10, CAPN2, CXCR1, EPHA10, ANO8, AQP6, AQP1, DSG1, ABCA8, BRI3, CDC42EP5, NPR3, MPP1, FAM162A, CDC42SE1, DENND5A, SH3BP5, BST1, AFG1L, ENPEP, SLC7A9, DUSP15, SLC25A31, FXYD2, ACE, AP3S1, CATIP, BSN, CLDN2, CAV3, AP3S2, TMEM63B, DCXR, ACKR2, ANO5, AP1S3, CMTM8, EPB41L3, C12orf66, COMTD1, ATP12A, PIK3AP1, CYP3A43, HSD3B7, B3GAT1, CASQ1, PYCARD, DIP2A, MPP2, HMOX1, LRFN2, HAS3, SLC43A2, SLC16A6, KCNJ10, KCNJ12, MFAP3L, GFRA2, MCUB, EHD3, MLIP, KIAA2013, MAP1LC3B, FMO1, DPY19L1, LRP2, ALOX12, NPHS1, KIAA0040, CHL1, NXPE2, IL23R, OR10R2, MRC1, GRIN2D, NSMF, MAPK8IP1, ABCC2, KCTD8, LRRK2, NPC1L1,
   [0400] g. Tissue protected: Heart (cardiomyocytes) TMED6, SLC30A4, SPAG4, TMEM138, SLC7A6, UCP3, CD300C, CD36, MGAT4C, RASL10B, SLC14A1, TMEM106B, VIPR2, SLC22A15, SLC25A17, TGFBR3, STBD1, SUSD3, SLC4A10, NTRK3, RAC1, NEGR1, NUS1, PPP1R16B, BVES, LDLR, RAC3, PARVB, POPDC2, PCDH10, RECK, PLCH2, PLN, RAB28, MRGPRF, SEL1L3, SERP1, SHISA4, INPP5D, MGAT4B, FLT1, SPATA9, SGCG, SRL, MAPKAP1, SLC9A3, PRRT2, PRKN, LANCL2, ART3, MYORG, PLPP7, SLC8A1, DMPK, EHD2, OBSCN, RFTN2, SERP2, SIPA1, SLC7A7, YRDC, TMEM106C, TMEM143, VAMP5, TREML1, UTRN, VPS35L, ZP2, QTRT1, TOMM40L, TBCD, PRRG2, TMX2, SEMA6B, SIRT2, SH2D3C, SCAMP5, PIGZ, SLC39A2, SLC39A14, RYR1, SLAMF8, SNX6, TGFBR1, SLCO2B1, SEMA5B, ST8SIA2, SCN7A, SLC35G2, MSMO1, NAPB, TSNARE1, TYRO3, UBL3, TMEM39B, EMC9, EHD1, GSDMB, EVA1A, MMP27, CX3CR1, EHD4, FPR1, GRAP, CKMT2, PHKA1, CYP2W1, ABCG1, CYP2S1, DSP, ABCG2, CAVIN1, GPC5, CDH15, ADRA1A, CADM4, RASGRP2, CAVIN4, CLN6, CREB3L2, TM7SF2, HHATL, FAM168B, CALN1, CYB561A3, FCGR2B, CHRNA1, GPAT2, FGD2, CYP4V2, DEPDC5, MALL, DGKQ, CAMK2B, IGSF11, CLEC2B, FES, MBOAT7, CPTP, LIME1, L EPROTL1, LPP, MAN1C1, ADGRL4, CLIC2, ABHD16A, CXCR1, EPHA10, FCGRT, ANO8, ANKRD13B, B3GNT4, DGKZ, B3GNT8, CDC42SE1, ATP1A3, DENND5A, CNTNAP3, BST1, CAV1, AFG1L, SLC25A31, AP3S1, ATP1A2, BSN, CADPS, CAV2, CAV3, CD300A, CDH13, CD1D, AKAP6, ADGRG6, ADRB1, AP3S2, TMEM30B, CFC1, DCXR, ANO5, AP1S3, CMTM8, BCL2L13, BACE2, CNPPD1, COMTD1, HSD3B7, CASQ1, SLC16A6, MFAP3L, NCAM1, GPR182, LIMS2, MCUB, EHD3, GPR15, MLIP, DPY19L1, SLC2A8, ALOX12, NOD2, OR10R2, MCEMP1, DES, LRRK2,
   [0401] h. Tissue protected: Thyroid TMED6, TMEM158, SLC30A4, TMEM138, TMEM106B, TRIM13, UBE2J1, VIPR2, SLC22A15, TMEM135, SLC25A17, TGFBR3, PIM1, SLITRK4, ENPP1, SCNN1D, NTRK3, NEGR1, NUS1, PPP1R16B, KCNQ5, BVES, TPO, TMEM40, RHBDD2, PCDH10, RDH13, RAB28, LIN7A, SEL1L3, SERP1, INPP5D, UPK3BL2, MAPKAP1, PRKN, LANCL2, PSD3, PLPP7, SLC8A1, NTRK2, OBSCN, SERP2, TRPM2, SLC7A7, YRDC, TMEM106C, UTRN, VPS35L, QTRT1, TMEM128, TBCD, UNC13B, PRRG2, UPK3BL1, RTP5, RAB43, SLC39A2, SLC39A14, RNFT2, SLCO2B1, SREBF1, REEP4, MSMO1, TSNARE1, SIGLEC9, TYRO3, UBL3, TMEM39B, C19orf18, EFHD1, IYD, DUOX1, EMC9, EHD1, EVA1A, GPR37, CX3CR1, EHD4, GRAP, PHKA1, CYP2W1, ABCG1, CYP2S1, ABCG2, CAVIN1, GPC5, DAB2, FYN, FPR2, CADM4, CLCNKB, RASGRP2, CLCNKA, CLN6, CREB3L2, FAM168B, ATRAID, CALN1, DMTN, FCGR2B, FAM210A, GPAT2, FGD2, HCN1, FMO3, DEPDC5, MALL, GDAP1, LPXN, DGKQ, CAMK2B, IGSF11, FES, LIME1, ADGRL4, CLIC2, EPHB1, CAPN2, CXCR1, EPHA10, FER1L6, ANO8, ANKRD13B, PROCR, DENND5A, ELMO2, AAK1, CAV1, AFG1L, ENPEP, CRHR1, CAV2, CD300A, TMEM63B, TMEM30B, DCXR, ACKR2, AP1S3, CMTM8, C12orf66, COMTD1, HSD3B7, CEACAM3, PYCARD, MPP2, NCAM1, GFRA2, GPR15, MAP1LC3B, OR10R2, GRIN2D, MAPK8IP1, NCS1,
   [0402] i. Tissue protected: Pancreatic endocrine cells (Islets) SLC30A4, MAP1LC3A, SCGN, UBE2J1, SLC25A17, TGFBR3, PIM1, STX1A, RAB3A, RTN1, SCG3, HCRTR1, NEGR1, POMGNT2, PTGDR2, RDH13, PTPRT, SERP1, UPK3BL2, SPPL3, MAPKAP1, PTPRN, PRKN, LANCL2, PTH2R, MYORG, SLC8A1, OBSCN, NECAB2, SLC17A6, SERP2, TRPM2, YRDC, UTRN, TSPAN7, TNS2, UNC13B, PLAUR, SLC30A8, PRNP, PRRG2, UPK3BL1, STK10, SCAMP5, SYP, PTPRN2, SLC39A2, SLC38A5, SLCO2B1, MAPK10, SLC35G2, MSMO1, OPRD1, NAPB, TSNARE1, SIGLEC9, TMEM39B, FFAR2, DGCR2, PHKA1, CYP2W1, CLTRN, GNAO1, CREB3L2, CASR, AQP8, CD82, CYP2B6, CYP4V2, GDAP1, DGKQ, IGSF11, SLC7A8, CAPN2, CXCR1, EPHA10, DGKZ, ENO2, ELMO2, AFG1L, FXYD2, AMPH, ATP1A2, CADPS, CRHR1, CD1D, TMEM30B, CFC1, AP1S3, EPB41L3, BBS7, GAD2, ALOX5, MPP2, SLC16A6, GPR153, GFRA2, KIAA2013, MAP1LC3B, FMO1, OR10R2,
   [0403] j. Tissue protected: Pancreatic exocrine cells TMED6, TMEM138, CLEC10A, CD300C, RASL10B, TBC1D3D, UBE2J1, SELPLG, PIM1, ENPP1, STIMATE, SLC4A10, NTRK3, SLC26A1, PPP1R16B, POMGNT2, TMEM40, PCDHA4, RDH13, PTPRT, PSCA, KCNH8, MRGPRF, SEL1L3, SERP1, UPK3BL2, SPATA9, PRKN, PTH2R, NEURL1, MYORG, PLPP7, SLC8A1, OBSCN, SERP2, TMEM72, TRPM2, UGT3A1, SLC3A1, VSIG10, YRDC, TMEM106C, VAMP5, UTRN, UNC13D, TMEM128, UNC13B, PLAUR, TBC1D3E, SYTL2, TMPRSS2, TMX2, UPK3BL1, SYCN, SCAMP5, SLC39A2, SLC39A14, SLC38A5, SLCO2B1, SLC4A4, SEC11C, SCN7A, REEP4, ARHGAP27, NAPB, TSNARE1, TRAF3IP3, TMEM39B, EFHD1, DPEP1, EMC9, CUZD1, EVA1A, GLRB, KIRREL2, FA2H, GRAP, CYB5A, ABCG1, DSP, DAB2, FPR2, RASGRP2, CLN6, CREB3L2, FCGR2B, AQP8, FAM210A, GPAT2, FGD2, CA4, FMO3, CYP4V2, MALL, DGKQ, IGSF11, FES, LIME1, LEPROTL1, MAN1C1, EPHA10, AQP1, BRI3, KDELR3, CDH9, FAM162A, CDC42SE1, DENND5A, ACE2, CNTNAP3, AFG1L, SLC25A31, FXYD2, BSN, CADPS, CAV2, CD300A, TMEM30B, AP1S3, CMTM8, C12orf66, COMTD1, PIK3AP1, HSD3B7, ALG14, BBS7, CASQ1, AQP12A, AQP12B, PYCARD, MPP2, NCAM1, GFRA2, MCUB, KIAA2013, NOD2, OR10R2, MAPK8IP1, LRRK2,
[0404] 12. Cancer treated: breast cancer
   [0405] a. Tissue protected: Colon TTYH3, ZDHHC2, UGT2A3, TMEM138, TMEM60, MS4A8, C2CD2, FCAMR, RMDN2, SNTG2, SYT13, STX1A, LPCAT2, SLC26A2, PITPNM1, SOCS7, PCDHB5, NDUFS8, SLC19A3, MGAM, ARHGAP5, PLPP1, MUC12, VPS26B, WHAMM, PTPRD, ITGB1, KLRG1, DLC1, PLCB3, SLC25A20, PVR, RAB3B, PSCA, KCNH8, SEL1L3, TMEM45A, TPSG1, TRPM7, UPK3BL2, SPPL3, STYK1, TMEM134, MAPKAP1, SLC9A3, IFI27, ITLN1, PTGDR, SYNGR4, PEX10, OSBPL7, ABCB1, LRRC55, PLPP7, OBSCN, PLOD1, NUP54, UGT2B4, TMEM72, UGT2B17, VSIG10, SYT11, SLC7A7, TMEM143, UGT2B28, ZP2, QTRT1, TMEM69, SYTL3, TMEM253, PLAUR, UGT2B15, UPK3BL1, SLC22A1, SEZ6, SCAMP5, SYP, PIGZ, SLC39A2, SLC39A14, SLC6A15, SNX6, SDCBP2, SEC11C, SH3KBP1, PHLPP2, REEP4, SLC35B1, TMEM171, VASN, TCTN3, ATG2B, CRK, CDHR5, DPEP1, HTR7, GSDMB, FGFR2, IGSF8, SLC2A12, KIFC3, FPR1, ABCG1, ABCG2, ACSL5, CD177, CLCA1, GLP2R, CEACAM1, GBA2, FPR2, RASGRP2, HTR1A, ENOX2, GPR34, DMTN, CEACAM5, CHODL, CA4, GDAP1, GNG11, IGSF11, CPTP, HSD17B2, SLC7A8, FADS3, EPHA10, FER1L6, ANKRD13B, AQP1, BEST2, BRI3, CDC42EP5, MPP1, GAL3ST2, B3GNT8, KDELR3, CDHR2, ACE2, SH3BP5, CNTNAP3, CDH17, ENPEP, CLDN11, KCNIP3, CADPS, C1orf210, ORAI1, ADGRG6, ASIC5, DCXR, ACKR2, ARHGEF4, EPB41L2, ABHD12, BCL2L13, CDH26, BLNK, CYP2C9, DIP2A, IBTK, ABCC5, HMOX1, GRB14, GPR153, MS4A12, SLC16A9, KIAA2013, ITGB4, LY9, GPA33, LZTR1, MUC13, NFXL1, LBR, OR10R2, MRC1, NDUFB9,
   [0406] b. Tissue protected: Lung SLC30A4, LRP1, CD300C, VIPR2, RMDN2, SLC22A15, SLC25A17, LPCAT2, SLC19A3, NUS1, AGER, TRPV6, SLC18A2, WHAMM, SLC25A20, REEP2, PTPRG, MGAT4B, SGIP1, OSBPL7, KIRREL3, EHD2, OBSCN, QTRT1, P2RY2, SEZ6, RHOG, SLC39A2, SLC6A15, STEAP1, RYK, PHLPP2, REEP4, ATG2B, HLA-DRB1, EHD1, FGFR2, EHD4, FPR1, CD247, CCR7, ABCG1, CAVIN1, ACSL5, GBA2, CLDN18, GPR34, HCLS1, DMTN, CEACAM5, CCDC88A, AIFM2, FES, CLIC2, ANKRD13B, AQP1, ABCA8, AIG1, APBB1IP, DGKG, FCAR, ELMO2, CAV1, AQP4, ENPEP, CACNA2D2, ACE, CAV2, ANXA1, EPB41L2, BDKRB2, CXCR3, CAVIN2, IBTK, GRB14, LAMP3, EHD3, MMP2, GALNT13, NSMF,
   [0407] c. Tissue protected: Skin TMEM243, TTYH3, ZDHHC2, SUN3, TMEM138, C2CD2, CLEC10A, CD300C, ACER3, PERP, VIPR2, SOX10, SNTG2, SLC25A17, TMPRSS11D, SLC6A1, PITPNM1, PCDHB5, TMEM97, ARHGAP5, NEGR1, NUS1, NTM, TMEM40, VPS26B, REEP2, KCNH8, GPIHBP1, TMEM45A, MGAT4B, TYROBP, STYK1, TMEM134, SLC10A6, MAPKAP1, SLC9A3, IFI27, LRRC55, PLPP7, LAX1, KRT1, PLA2G4E, OBSCN, RMC1, SLC7A7, SRC, ZP2, TMEM69, SYTL3, TACSTD2, UGT2B15, P2RY2, SLC22A1, SLC39A2, SDCBP2, RYK, SH3KBP1, SLC19A1, LY6D, REEP4, RIPK4, TMEM171, CRK, COL17A1, CYBA, FGFR2, IGSF8, FA2H, FPR1, ABCG1, DSP, CAVIN1, CDH6, CD177, GLP2R, CACNA2D1, GBA2, FPR2, ENOX2, GPR34, DMTN, FAT2, CD99, CD248, HCN1, GDAP1, DEF6, DSC3, FGFBP1, SLC7A8, FADS3, EPHA10, B3GNT4, DSG1, ABCA8, BRI3, KDELR3, CAV1, CCR2, MS4A1, CAV2, CAV3, CD1D, ANXA1, ASPRV1, C1orf210, ORAI1, ASIC5, DSG3, DCXR, ACKR2, BCL2L13, ATP12A, BLNK, IBTK, ABCC1, ABCC5, GPR153, SLC16A9, TACR1, ITGB4, OR10R2, NDUFB9, NCS1, TMEM243, SLC30A4, ZDHHC6, MS4A8, SLC2A1, RMDN2, SYT13, LPCAT2, RETSAT, RHBG, DLC1, PLN, SEL1L3, TECTA, SGIP1, OSBPL7, NUP54, TMEM143, QTRT1, DCT, RHCG, RHOG, PMEL, SEMA5B, PHLPP2, TCTN3, EHD1, GSDMC, KIFC3, EHD4, IGSF3, HLA-DPA1, GSG1L, CYB561A3, FCGR2B, CEACAM5, GPAT2, DNER, FGD2, IGSF11, CPTP, B3GNT8, ELMO2, CDH13, EPB41L2, ATG2A, BDKRB2, ADGRA1, CAVIN2, LHFPL6, MUC21, EHD3, KIT, LZTR1, ,
   [0408] d. Tissue protected: Liver TTYH3, TMEM138, LRP1, C2CD2, CLEC10A, CD300C, CREB3L3, FCAMR, RMDN2, SYT13, SLC25A17, LPCAT2, SLC25A40, SLCO1B3, SLCO1B1, NDUFS8, SLC25A43, SLC27A5, SLC19A3, RETSAT, NEGR1, SLC18A2, PTPRD, KSR2, PTGDR2, SLC25A20, LIN7A, SEL1L3, TMEM45A, MGAT4B, SPPL3, MAPKAP1, SYNGR4, PRRT2, ABCB1, LRRC55, NAT8, KIRREL3, MME, OBSCN, UGT2B4, TFR2, UGT1A6, ZDHHC13, UGT2B15, ST7L, SLC22A1, SLC39A2, SLC39A14, SLCO2B1, SDCBP2, TEX261, TMEM171, VASN, CRK, CDHR5, GSDMB, FGFR2, EVA1A, GPR37, KIFC3, CYP2D6, ABCG1, GJA5, ACSL5, CD177, CACNA2D1, CEACAM1, GBA2, CACNA1A, FPR2, GAS2, SLC2A2, RASGRP2, HTR1A, CREB3L2, CYP2A7, GPR34, FOLH1, CYP1A2, DMTN, CYP3A4, CEACAM5, CYP2B6, FMO3, GPRC5B, NINJ1, CYP2C8, CDH2, FES, HSD17B2, MAL2, CYP2C19, FADS3, BCL2L10, AQP9, ABCA8, AIG1, BRI3, CDHR2, ENPEP, ASGR1, ABCB11, CTSL, C1orf210, ASIC5, ACAD11, DCXR, HSD11B1, ASGR2, ATG2A, PIK3AP1, CAVIN2, CYP2C9, IBTK, GRB14, MADCAM1, LIMS2, SLC16A9, GPR15, ITGB4, SLC2A8, LZTR1, OR10R2, NDUFB9, ABCC2, DPP4, NPC1L1,
   [0409] e. Tissue protected: Kidney (glomeruli) ZDHHC16, TMEM138, ZDHHC6, ACER3, VIPR2, KDR, RMDN2, SLC22A15, SYT13, SLC25A17, SLC45A1, PCDHB5, SLC19A3, MGAM, PODXL, KIRREL1, PLPP1, TRPV6, WHAMM, ITGB1, KSR2, PVR, PTPRG, SEL1L3, TPSG1, SCUBE1, TECTA, PTGDR, PLA2R1, PTH2R, LRRC55, KIRREL3, MAP6, NOS3, EHD2, MME, NKD1, NPHS2, RMC1, ZC3H12A, TSPAN7, TTC7B, SLC22A1, SNCA, SNX6, SDCBP2, RYK, PITPNM3, PTPRO, SLC35B1, TMEM171, VASN, HTR7, EHD1, FGFR2, EVA1A, HYAL2, EHD4, CAVIN1, CDH6, CEACAM1, GAS2, CD93, FAM107A, CD34, RASGRP2, HTR1A, GPR34, DMTN, ENG, CD99, CD248, FGD2, GPRC5B, MAS1, ADGRL4, CLIC2, FADS3, AQP1, ELMO2, CAV1, ENPEP, CHRM1, CAV2, CDH13, ANXA1, EPB41L2, BBS7, ABCC1, GRB14, SLC43A2, LIMS2, GPR153, ITGA8, SLC16A9, EHD3, MLIP, MMP2, LZTR1, NFXL1, IKBIP, DYSF, DPP4, PDGFRA,
   [0410] f. Tissue protected: Kidney (tubules) TMEM243, TTYH3, ZDHHC2, SUN3, TRPM3, TMEM138, ZDHHC6, TBC1D3G, TREH, MS4A8, C2CD2, ACER3, FCAMR, THY1, VIPR2, RMDN2, SLC22A15, TMEM240, SLC5A12, SLC12A1, PITPNM1, SLC25A40, PCDHB5, SLC6A19, S1PR2, NDUFS8, SLC34A3, SLC19A3, MGAM, ARHGAP5, SLC28A2, RDH11, RETSAT, NEGR1, KIRREL1, PLPP1, AGER, RHBG, VPS26B, VHL, WHAMM, PTPRD, DLC1, PLCB3, PDE2A, SLC25A20, PVR, RALB, PSCA, KCNH8, KCNJ1, LIN7A, SEL1L3, TMEM45A, UCHL1, MGAT4B, TRPM7, UPK3BL2, TMEM132E, PRICKLE1, SPPL3, STYK1, TMEM134, MAPKAP1, SLC9A3, IFI27, PTGDR, SGIP1, NOS1, PEX10, PRRT2, OSBPL7, ABCB1, LRRC55, NAT8, PLPP7, KIRREL3, EHD2, MME, OBSCN, PLOD1, NUP54, RFTN2, UGT2B4, SLC22A6, TMEM72, UGT3A1, VSIG10, A TP6V0A4, SLC7A7, SRC, ZC3H12A, ZP2, QTRT1, UGT1A6, TMEM252, SYTL3, TMEM174, TTC7B, PLAUR, ZDHHC13, RHCG, TMPRSS2, FASLG, UPK3BL1, SLC28A1, SLC22A1, SLC22A2, RHOG, SCAMP5, SLC22A8, SLC13A3, PIGZ, SLC39A2, SLC39A14, SNX6, SLC6A18, SLC13A2, TMEM213, SLC5A1, SLC4A4, SDCBP2, RYK, SEC11C, TEX261, REEP4, SLC35G2, RIPK4, TMEM171, VASN, ATG2B, CRK, CDHR5, ENPP6, EMC4, IYD, DPEP1, ENPP3, CUBN, CLSTN2, EHD1, GSDMB, FGFR2, EVA1A, IGSF8, HYAL2, GSDMC, KIFC3, KIRREL2, EHD4, CKMT2, ABCG1, CLTRN, GJA5, ACSL5, CDH6, CD177, FAM151A, GBA2, GAS2, FAM107A, FNDC5, GSG1L, SLC2A2, HTR1A, ADGRG5, CREB3L2, ENOX2, FAM169A, GPR34, CASR, FOLH1, DMTN, CD248, CLIC4, CYP2B6, CA4, FMO3, GDAP1, GNG11, GLIPR1L2, KIAA0319, GPRC5B, IGSF11, CDH2, FES, CPTP, SLC7A8, MAL2, FADS3, BSND, BCL2L10, EPHA10, AQP6, AQP1, DSG1, ABCA8, AIG1, BRI3, CDC42EP5, NPR3, MPP1, CDC42SE1, CDHR2, ADAM28, SH3BP5, CCR2, ENPEP, DUSP15, FXYD2, ACE, CLDN2, CAV3, CPT1B, COX7B, CTSL, C1orf210, A SIC5, DCXR, ACKR2, ARHGEF4, EPB41L2, ATP12A, BLNK, PIK3AP1, CDH16, DIP2A, IBTK, ABCC5, HMOX1, LRFN2, GRB14, SLC43A2, KCNJ10, KCNJ12, KCNK5, SLC16A9, EHD3, MLIP, KIAA2013, LZTR1, NFXL1, NXPE2, IL23R, OR10R2, MRC1, NDUFB9, NSMF, IKBIP, ABCC2, KCTD8, DYSF, DPP4, NPC1L1,
   [0411] g. Tissue protected: Heart (cardiomyocytes) TTYH3, SLC30A4, SPAG4, TMEM138, ZDHHC6, UCP3, CD300C, VIPR2, RMDN2, SLC22A15, SYT13, SLC25A17, LPCAT2, PITPNM1, PCDHB5, SGCB, NDUFS8, SLC19A3, RETSAT, NEGR1, NUS1, VPS26B, WHAMM, PTPRD, P2RY6, SLC25A20, PLN, PVR, GPIHBP1, SEL1L3, MGAT4B, SGCG, SRL, MAPKAP1, SLC9A3, TECTA, SGIP1, PRRT2, OSBPL7, LRRC55, ART3, PLPP7, EHD2, OBSCN, RFTN2, SIPA1, SLC7A7, SRC, TMEM143, TREML1, ZC3H12A, ZP2, QTRT1, TTC7B, ZDHHC13, SLC22A1, SCAMP5, RAB11FIP4, PIGZ, SLC39A2, SLC39A14, RYR1, SLAMF8, SNX6, SLCO2B1, SEMA5B, TEX261, SLC35B1, SLC35G2, TMEM171, VASN, TCTN3, ATG2B, CRK, EHD1, GSDMB, FGFR2, EVA1A, EHD4, FPR1, CKMT2, ABCG1, DSP, ABCG2, CAVIN1, CDH6, CACNA2D1, CDH15, GBA2, ADRA1A, FNDC5, RASGRP2, HTR1A, CREB3L2, HHATL, FAM168B, GPR34, CYB561A3, FCGR2B, CHRNA1, CD248, GPAT2, FGD2, CAMK2B, GPRC5B, IGSF11, CDH2, FES, CPTP, LEPROTL1, ADGRL4, CLIC2, FADS3, EPHA10, FCGRT, ANKRD13B, B3GNT4, AIG1, B3GNT8, DGKG, CDC42SE1, CDHR2, ADAM28, CNTNAP3, CAV1, CCR2, CSF3R, CADPS, CAV2, CAV3, CPT1B, COX7B, CDH13, CD1D, ORAI1, ADGRG6, ADRB1, ASIC5, ACAD11, CFC1, DCXR, ARHGEF4, BCL2L13, BLNK, IBTK, ABCC5, GRB14, GPR182, LIMS2, KCNK5, SLC16A9, EHD3, GPR15, MLIP, MMP2, ITGB4, SLC2A8, LZTR1, NFXL1, OR10R2, NDUFB9, MCEMP1, DES, DYSF,
   [0412] h. Tissue protected: Thyroid SLC30A4, TMEM138, ZDHHC6, C2CD2, TMEM100, VIPR2, RMDN2, SLC22A15, SYT13, SLC25A17, SLITRK4, SLC5A5, LPCAT2, PCDHB5, NDUFS8, SLC19A3, ARHGAP5, RETSAT, NEGR1, NUS1, TPO, TRPV6, TMEM40, VPS26B, VHL, WHAMM, SLC25A20, PVR, GPIHBP1, LIN7A, SEL1L3, UPK3BL2, PRICKLE1, MAPKAP1, IFI27, OSBPL7, PSD3, LRRC55, PLPP7, OBSCN, PORCN, SLC7A7, ZC3H12A, QTRT1, SYTL3, TTC7B, FASLG, UPK3BL1, RTP5, SLC22A1, SLC26A4, SLC39A2, SLC39A14, SLCO2B1, SDCBP2, RYK, SH3KBP1, TEX261, REEP4, TMEM171, TCTN3, IYD, HTR7, EHD1, FGFR2, EVA1A, GPR37, KIFC3, EHD4, ABCG1, ABCG2, CAVIN1, CDH6, GBA2, FPR2, RASGRP2, HTR1A, CREB3L2, FAM168B, GPR34, DMTN, FCGR2B, CD99, GPAT2, FGD2, HCN1, FMO3, IPCEF1, GDAP1, CAMK2B, IGSF11, CDH2, FES, ADGRL4, CLIC2, EPHA10, FER1L6, ANKRD13B, ELMO2, AAK1, CAV1, AQP4, ENPEP, CRHR1, CAV2, ANXA1, ORAI1, DCXR, ACKR2, ARHGEF4, EPB41L2, CDH26, BLNK, CDH16, CDH10, AP3B2, CAVIN2, IBTK, MTNR1B, KCNK5, SLC16A9, GPR15, ITGB4, LZTR1, OR10R2, NDUFB9, IKBIP, NCS1,
   [0413] i. Tissue protected: Pancreatic endocrine cells (Islets) ZDHHC2, SLC30A4, STXBP1, ACER3, SYT13, SLC25A17, STX1A, RAB3A, PITPNM1, PCDHB5, RTN1, NDUFS8, SCG3, ARHGAP5, RETSAT, NEGR1, POMGNT2, VHL, PTGDR2, SLC25A20, PVR, RAB3B, UCHL1, UPK3BL2, PRICKLE1, SPPL3, MAPKAP1, PTPRN, PTH2R, LRRC55, KIRREL3, OBSCN, NECAB2, SLC17A6, SHISAL2B, SV2A, ZC3H12A, TMEM69, TSPAN7, TTC7B, PLAUR, ZDHHC13, SLC30A8, FASLG, UPK3BL1, SLC22A1, SCAMP5, SYP, SLC39A2, SLCO2B1, SDCBP2, TEX261, MAPK10, SLC35G2, VASN, ATG2B, CRK, EMC4, HTR7, FGFR2, DGCR2, CLTRN, CDH6, GBA2, GNAO1, CREB3L2, FAM169A, FBXO2, GPR34, CASR, CD99, CYP2B6, GDAP1, IGSF11, CDH2, SLC7A8, EPHA10, ELMO2, FXYD2, AMPH, CADPS, CRHR1, CD1D, ASIC5, CFC1, ARHGEF4, EPB41L2, CDH26, BBS7, GAD2, ALOX5, IBTK, ABCC5, GPR153, KIAA2013, OR10R2, NDUFB9, DPP4,
   [0414] j. Tissue protected: Pancreatic exocrine cells ZDHHC2, TMEM138, C2CD2, CLEC10A, CD300C, TBC1D3D, TMEM100, RMDN2, SYT13, TMEM97, SLC19A3, SEC16B, RETSAT, PLPP1, POMGNT2, TMEM40, VPS26B, VHL, WHAMM, SLC25A20, PVR, PSCA, KCNH8, SEL1L3, UPK3BL2, TMEM132E, STYK1, SCUBE1, IFI27, PTH2R, NEURL1, LRRC55, PLPP7, OBSCN, NUP54, TMEM72, UGT3A1, VSIG10, ZC3H12A, TTC7B, PLAUR, TBC1D3E, ZDHHC13, TACSTD2, TMPRSS2, FASLG, UPK3BL1, SLC22A1, SYCN, SCAMP5, SLC39A2, SLC39A14, SLCO2B1, SLC4A4, SDCBP2, RYK, SEC11C, SLC19A1, REEP4, TCTN3, CRK, DPEP1, CUZD1, FGFR2, EVA1A, SLC2A12, KIFC3, KIRREL2, FA2H, ABCG1, DSP, ACSL5, CDH6, GBA2, CYSTM1, FPR2, RASGRP2, CREB3L2, FBXO2, GPR34, FCGR2B, CD248, GPAT2, FGD2, CA4, FMO3, GPRC5B, IGSF11, FES, LEPROTL1, FADS3, EPHA10, AQP1, BRI3, KDELR3, CDH9, DGKG, CDC42SE1, ADAM28, ACE2, CNTNAP3, CFTR, FXYD2, CADPS, CAV2, CTSL, C1orf210, CHST4, EPB41L2, PIK3AP1, BBS7, AQP12A, AQP12B, CAVIN2, IBTK, ABCC1, GRB14, SLC16A9, KIAA2013, NFXL1, OR10R2, NDUFB9,

TABLE 3B

List of proteins that meet criteria and have at least medium expression on tissues where immune cell inhibition is desired (Ensembl version 92.38 ID for is provided for each gene symbol)
AXL(ENSG00000167601), VPS52(ENSG00000223501), SCGN(ENSG00000079689), SLC9A2(ENSG00000115616), PCSK5(ENSG00000099139), SELENBP1(ENSG00000143416), SNX24(ENSG00000064652), SMIM24(ENSG00000095932), SMURF1(ENSG00000198742), NAAA(ENSG00000138744), SEC13(ENSG00000157020), SLC41A2(ENSG00000136052), SOCS7(ENSG00000274211), QRFPR(ENSG00000186867), RPH3AL(ENSG00000181031), RAC1(ENSG00000136238), NFAM1(ENSG00000235568), LDLR(ENSG00000130164), GPR65(ENSG00000140030), RAC3(ENSG00000169750), WSCD1(ENSG00000179314), HTRA1(ENSG00000166033), RAB27B(ENSG00000041353), DLC1(ENSG00000164741), PLCB3(ENSG00000149782), MUC1(ENSG00000185499), PSTPIP2(ENSG00000152229), RAB3B(ENSG00000169213),
SDC1(ENSG00000115884), TMEM45A(ENSG00000181458), SPPL3(ENSG00000157837), STYK1(ENSG00000060140), MAPKAP1(ENSG00000119487), IFI27(ENSG00000165949), ITLN1(ENSG00000179914), PTGDR(ENSG00000168229), SGMS1(ENSG00000198964), ITGB6(ENSG00000115221), MUC15(ENSG00000169550), PEX10(ENSG00000157911), OSBPL7(ENSG00000006025), CD46(ENSG00000117335), PROM2(ENSG00000155066), PLPP7(ENSG00000160539), MGAT4A(ENSG00000071073), LRRN2(ENSG00000170382), OBSCN(ENSG00000154358), PROM1(ENSG00000007062), VSIG10(ENSG00000176834), TMEM236(ENSG00000148483), VPS35L(ENSG00000103544), SYTL4(ENSG00000102362), SYTL3(ENSG00000164674), TMEM41A(ENSG00000163900), TSPAN8(ENSG00000127324), UNC13B(ENSG00000198722), SYTL2(ENSG00000137501), TPRA1(ENSG00000163870), OCLN(ENSG00000197822), RNF170(ENSG00000120925), SPHK1(ENSG00000176170), SLC28A3(ENSG00000197506), PTAFR(ENSG00000169403), SYP(ENSG00000102003), PIGZ(ENSG00000119227), PTPRN2(ENSG00000155093), RSAD2(ENSG00000134321), SLC39A14(ENSG00000104635), SLC6A12(ENSG00000111181), SLC6A15(ENSG00000072041), RAB25(ENSG00000132698), SLC20A2(ENSG00000168575), TGFBR1(ENSG00000106799), STK16(ENSG00000115661), TRAF4(ENSG00000076604), SIGLEC14(ENSG00000254415), MTG2(ENSG00000101181), SPTLC3(ENSG00000172296), MARK2(ENSG00000072518), RNF186(ENSG00000178828), TSPAN15(ENSG00000099282), TRAF3IP3(ENSG00000009790), VTCN1(ENSG00000134258), TAS2R38(ENSG00000257138), TMEM39B(ENSG00000121775), CA2(ENSG00000104267), CDHR5(ENSG00000099834), CLDN4(ENSG00000189143), ARL4D(ENSG00000175906), ACVR1B(ENSG00000135503), DPEP1(ENSG00000015413), GSDMB(ENSG00000073605), GPBAR1(ENSG00000179921), SYK(ENSG00000165025), ADCY10(ENSG00000143199), ACSL5(ENSG00000197142), CD177(ENSG00000204936), CLCA1(ENSG00000016490), GLP2R(ENSG00000065325), DSC2(ENSG00000134755), ADGRF1(ENSG00000153292), CLDN5(ENSG00000184113), DSG2(ENSG00000046604), AQP8(ENSG00000103375), CEACAM5(ENSG00000105388), CHST6(ENSG00000183196), CA4(ENSG00000167434), EPCAM(ENSG00000119888), GNG11(ENSG00000127920), CTDNEP1(ENSG00000175826), MAGI1(ENSG00000151276), ENTPD8(ENSG00000188833), FPGS(ENSG00000136877), MAN1C1(ENSG00000117643), FADS2(ENSG00000134824), FER1L6(ENSG00000214814), BEST2(ENSG00000039987), BRI3(ENSG00000164713), CLDN8(ENSG00000156284), GAL3ST2(ENSG00000154252), HTR4(ENSG00000164270), B3GNT8(ENSG00000177191), ELOVL7(ENSG00000164181), B3GALT5(ENSG00000183778), CDHR2(ENSG00000074276), CLDN7(ENSG00000181885), ACE2(ENSG00000130234), CNTNAP3(ENSG00000106714), CDH17(ENSG00000079112), ATP11C(ENSG00000101974), CIB1(ENSG00000185043), ASIC5(ENSG00000256394), DCXR(ENSG00000169738), AKAP10(ENSG00000108599), ARL4C(ENSG00000188042), ANO1(ENSG00000131620), CHST14(ENSG00000169105), ABHD12(ENSG00000100997), C12orf66(ENSG00000174206), ALG14(ENSG00000172339), HTR2B(ENSG00000135914), B3GAT1(ENSG00000109956), HHLA2(ENSG00000114455), MAOA(ENSG00000189221), FGFR4(ENSG00000160867), IBTK(ENSG00000005700), SLC9A3R2(ENSG00000065054), NCEH1(ENSG00000144959), KCNN3(ENSG00000143603), MC4R(ENSG00000166603), MCUB(ENSG00000005059), EPPK1(ENSG00000261150), MSTO1(ENSG00000125459), SLC2A6(ENSG00000160326), KIAA2013(ENSG00000116685), NIPAL1(ENSG00000163293), IL17RA(ENSG00000177663), ITGB4(ENSG00000132470), GPA33(ENSG00000143167), MUC13(ENSG00000173702), OR10R2(ENSG00000198965), PSKH1(ENSG00000159792), NDST2(ENSG00000166507), TGM2(ENSG00000198959), AXL(ENSG00000167601), SLC30A4(ENSG00000104154), SLC22A15(ENSG00000163393), SCEL(ENSG00000136155), AGER(ENSG00000204305), RECK(ENSG00000122707), SCTR(ENSG00000080293), EHD2(ENSG00000024422), PRRG2(ENSG00000126460), SLC39A10(ENSG00000196950), TM4SF1(ENSG00000169908), STEAP1(ENSG00000164647), EHD1(ENSG00000110047), CCR7(ENSG00000126353), CYB5A(ENSG00000166347), AIFM2(ENSG00000042286), LPAR6(ENSG00000139679), AIG1(ENSG00000146416), AQP4(ENSG00000171885), CYB561D1(ENSG00000174151), CACNA2D2(ENSG00000007402), ACE(ENSG00000159640), AQP3(ENSG00000165272), CADM1(ENSG00000182985), LAMP3(ENSG00000078081), EHD3(ENSG00000013016), NSMF(ENSG00000165802), SLC34A2(ENSG00000157765), LRRK2(ENSG00000188906), CLEC10A(ENSG00000132514), PERP(ENSG00000112378), SCEL(ENSG00000136155), SLC41A2(ENSG00000136052), RAC1(ENSG00000136238), RNF145(ENSG00000145860), NFAM1(ENSG00000235568), RAC3(ENSG00000169750), MTMR2(ENSG00000087053), REEP2(ENSG00000132563), TMEM134(ENSG00000172663), SLC10A6(ENSG00000145283), SGMS1(ENSG00000198964), OLFM2(ENSG00000105088), PROM2(ENSG00000155066), KRT1(ENSG00000167768), PLA2G4E(ENSG00000188089), OBSCN(ENSG00000154358), ZP2(ENSG00000103310), SYTL3(ENSG00000164674), TACSTD2(ENSG00000184292), STK16(ENSG00000115661), TRAF3IP3(ENSG00000009790), GJB4(ENSG00000189433), KCNJ8(ENSG00000121361), SYK(ENSG00000165025), FA2H(ENSG00000103089), DSP(ENSG00000096696), CD177(ENSG00000204936), ANO7(ENSG00000146205), CLDN5(ENSG00000184113), EPHA4(ENSG00000116106), CAPNS2(ENSG00000256812), DSC3(ENSG00000134762), GSDMA(ENSG00000167914), FGFBP1(ENSG00000137440), FADS3(ENSG00000221968), FADS2(ENSG00000134824), B3GNT4(ENSG00000176383), DSG1(ENSG00000134760), ADGRF4(ENSG00000153294), ASPRV1(ENSG00000244617), CIB1(ENSG00000185043), DSG3(ENSG00000134757), DCXR(ENSG00000169738), AQP3(ENSG00000165272), CNPPD1(ENSG00000115649), EPPK1(ENSG00000261150), FGFR3(ENSG00000068078), OR10R2(ENSG00000198965), PSKH1(ENSG00000159792), VPS52(ENSG00000223501), MS4A8(ENSG00000166959), MGAT4C(ENSG00000182050), SEC13(ENSG00000157020), TMEM45A(ENSG00000181458), IFI27(ENSG00000165949), ICAM3(ENSG00000076662), PLPP7(ENSG00000160539), PPL(ENSG00000118898), RHCG(ENSG00000140519), TPRA1(ENSG00000163870), RSAD2(ENSG00000134321), S100A8(ENSG00000143546), RAB25(ENSG00000132698), MARK2(ENSG00000072518), CLDN4(ENSG00000189143), DSC2(ENSG00000134755), GPX8(ENSG00000164294), HCN1(ENSG00000164588), CYB561D1(ENSG00000174151), CLEC2A(ENSG00000188393), HTR2B(ENSG00000135914), MAOA(ENSG00000189221), ITGB4(ENSG00000132470), ALOX12(ENSG00000108839), (), CLEC10A(ENSG00000132514), PI4KB(ENSG00000143393), ALPL(ENSG00000162551), ST6GAL1(ENSG00000073849), SLC25A40(ENSG00000075303), SLC27A2(ENSG00000140284), SLCO1B3(ENSG00000111700), SLCO1B1(ENSG00000134538), SLC25A43(ENSG00000077713), SLC27A5(ENSG00000083807), SERINC3(ENSG00000132824), PDZK1(ENSG00000174827), RDH16(ENSG00000139547), SLC25A15(ENSG00000102743), UGT2B4(ENSG00000156096), YIPF1(ENSG00000058799), TFR2(ENSG00000106327), UGT1A6(ENSG00000167165), TNS2(ENSG00000111077), TSPAN2(ENSG00000134198), SLC30A10(ENSG00000196660), GHR(ENSG00000112964), KCNJ8(ENSG00000121361), CYP2D6(ENSG00000100197), FYN(ENSG00000010810), GAS2(ENSG00000148935), SLC2A2(ENSG00000163581), CYP2A7(ENSG00000198077), CYP1A2(ENSG00000140505), CYP3A4(ENSG00000160868), CYP4V2(ENSG00000145476), NINJ1(ENSG00000131669), CYP2C8(ENSG00000138115), DHCR24(ENSG00000116133), CYP2C19(ENSG00000165841), AQP9(ENSG00000103569), ASGR1(ENSG00000141505), ABCB11(ENSG00000073734), ACAD11(ENSG00000240303), ASGR2(ENSG00000161944), CYP3A43(ENSG00000021461), INTS2(ENSG00000108506), CYP2C9(ENSG00000138109), LHFPL2(ENSG00000145685), MFAP3L(ENSG00000198948), ABCC2(ENSG00000023839), DPP4(ENSG00000197635), NPC1L1(ENSG00000015520), SLC45A1(ENSG00000162426), PODXL(ENSG00000128567), TPSG1(ENSG00000116176), PECAM1(ENSG00000261371), SCUBE1(ENSG00000159307), PLA2R1(ENSG00000153246), PNPLA3(ENSG00000100344), MAP6(ENSG00000171533), NPHS2(ENSG00000116218), PTPRO(ENSG00000151490), HYAL2(ENSG00000068001),
CD34(ENSG00000174059), EVI2A(ENSG00000126860), ENG(ENSG00000106991), CR1(ENSG00000203710), FADS3(ENSG00000221968), CRB3(ENSG00000130545), TTYH3(ENSG00000136295), TRPM3(ENSG00000083067), TREH(ENSG00000118094), FCAMR(ENSG00000162897), TM4SF18(ENSG00000163762), SELPLG(ENSG00000110876), SLC5A12(ENSG00000148942), SLC12A1(ENSG00000074803), SLC6A19(ENSG00000174358), SLC22A11(ENSG00000168065), S1PR2(ENSG00000267534), ARHGAP5(ENSG00000100852), RHBG(ENSG00000132677), PLLP(ENSG00000102934), VHL(ENSG00000134086), PARVB(ENSG00000188677), KCNH8(ENSG00000183960), LIN7A(ENSG00000111052), MGAT4B(ENSG00000161013), TMEM132E(ENSG00000181291), OLFM2(ENSG00000105088), NAT8(ENSG00000144035), MPP5(ENSG00000072415), SLC22A6(ENSG00000197901), TMEM72(ENSG00000187783), UGT3A1(ENSG00000145626), ATP6V0A4(ENSG00000105929), SLC7A7(ENSG00000155465), TMEM80(ENSG00000177042), ZP2(ENSG00000103310), TMEM252(ENSG00000181778), TMEM174(ENSG00000164325), RHCG(ENSG00000140519), SLC28A1(ENSG00000156222), SLC22A2(ENSG00000112499), SCAMP5(ENSG00000198794), SLC22A8(ENSG00000149452), RAB11FIP5(ENSG00000135631), SLC6A18(ENSG00000164363), SLC13A2(ENSG00000007216), TMEM213(ENSG00000214128), SYT7(ENSG00000011347), SLC4A4(ENSG00000080493), TMEM178B(ENSG00000261115), PKHD1(ENSG00000170927), SLC35G2(ENSG00000168917), TSPAN16(ENSG00000130167), ENPP6(ENSG00000164303), GGT1(ENSG00000100031), ENPP3(ENSG00000154269), CUBN(ENSG00000107611), GSDMC(ENSG00000147697), CPNE6(ENSG00000100884), CDH6(ENSG00000113361), CALCR(ENSG00000004948), CASR(ENSG00000036828), FOLH1(ENSG00000086205), CNTFR(ENSG00000122756), LRFN4(ENSG00000173621), AQP6(ENSG00000086159), CDC42EP5(ENSG00000167617), SH3BP5(ENSG00000131370), SLC7A9(ENSG00000021488), CLDN10(ENSG00000134873), FXYD2(ENSG00000137731), CMKLR1(ENSG00000174600), CLDN2(ENSG00000165376), ANXA13(ENSG00000104537), CDH16(ENSG00000166589), MOXD1(ENSG00000079931), KCND1(ENSG00000102057), FMO1(ENSG00000010932), LRP2(ENSG00000081479), ALOX12(ENSG00000108839), GRIN2D(ENSG00000105464), NECAP2(ENSG00000157191), MDGA2(ENSG00000139915), SLC27A6(ENSG00000113396), UCP3(ENSG00000175564), CD36(ENSG00000135218), MGAT4C(ENSG00000182050), RASL10B(ENSG00000270885), SLC4A10(ENSG00000144290), RNF145(ENSG00000145860), POPDC2(ENSG00000121577), PLN(ENSG00000198523), SGCG(ENSG00000102683), SRL(ENSG00000185739), DMPK(ENSG00000104936), YRDC(ENSG00000196449), TMEM143(ENSG00000161558), RAB11FIP4(ENSG00000131242), SLCO2B1(ENSG00000137491), TEX261(ENSG00000144043), SCN7A(ENSG00000136546), DSP(ENSG00000096696), CDH15(ENSG00000129910), GNB5(ENSG00000069966), RASGRP2(ENSG00000068831), CAVIN4(ENSG00000170681), CHRNA1(ENSG00000138435), CD248(ENSG00000174807), GPAT2(ENSG00000186281), LEPROTL1(ENSG00000104660), CDC42SE1(ENSG00000197622), ADAM28(ENSG00000042980), CSF3R(ENSG00000119535), CDH13(ENSG00000140945), ADGRG6(ENSG00000112414), ADRB1(ENSG00000043591), AP4E1(ENSG00000081014), CNPPD1(ENSG00000115649), MYZAP(ENSG00000263155), GPR182(ENSG00000166856), GPR15(ENSG00000154165), SLC16A10(ENSG00000112394), PRKCA(ENSG00000154229), DES(ENSG00000175084), TMEM100(ENSG00000166292), SLC5A5(ENSG00000105641), MPP7(ENSG00000150054), TPO(ENSG00000115705), PSD3(ENSG00000156011), IYD(ENSG00000009765), DUOX1(ENSG00000137857), EPHA4(ENSG00000116106), HCN1(ENSG00000164588), IPCEF1(ENSG00000074706), AAK1(ENSG00000115977), LRP1B(ENSG00000168702), STX1A(ENSG00000106089), RTN1(ENSG00000139970), SCG3(ENSG00000104112), PTGDR2(ENSG00000183134), PTPRN(ENSG00000054356), NECAB2(ENSG00000103154), SLC17A6(ENSG00000091664), SV2A(ENSG00000159164), TSPAN7(ENSG00000156298), SLC30A8(ENSG00000164756), DGCR2(ENSG00000070413), GNAO1(ENSG00000087258), FAM169A(ENSG00000198780), ATP9A(ENSG00000054793), CLU(ENSG00000120885), ATP1A2(ENSG00000018625), GAD2(ENSG00000136750), ALOX5(ENSG00000012779), TMEM97(ENSG00000109084), SYCN(ENSG00000179751), CUZD1(ENSG00000138161), GP2(ENSG00000169347), KIRREL2(ENSG00000126259), FA2H(ENSG00000103089), CFTR(ENSG00000001626), PIK3AP1(ENSG00000155629), AQP12A(ENSG00000184945), AQP12B(ENSG00000185176), UGT2A3(ENSG00000135220), CORO7(ENSG00000262246), GABARAPL2(ENSG00000034713), SPCS1(ENSG00000114902), TNFSF12(ENSG00000239697), PLEKHA3(ENSG00000116095), TVP23B(ENSG00000171928), WHAMM(ENSG00000156232), SLCO4A1(ENSG00000101187), SLC9A3(ENSG00000066230), PCDH11X(ENSG00000102290), PALM(ENSG00000099864), VEPH1(ENSG00000197415), CNEP1R1(ENSG00000205423), GOLGA2(ENSG00000167110), AATK(ENSG00000181409), SLC26A3(ENSG00000091138), UGT2B17(ENSG00000197888), SERAC1(ENSG00000122335), TVP23C(ENSG00000175106), UGT2B28(ENSG00000135226), TMEM253(ENSG00000232070), UGT2B15(ENSG00000196620), ARHGAP17(ENSG00000140750), C2orf88(ENSG00000187699), GOPC(ENSG00000047932), SNX6(ENSG00000129515), PHACTR2(ENSG00000112419), NAPG(ENSG00000134265), NAPB(ENSG00000125814), TMEM171(ENSG00000157111), TMEM30A(ENSG00000112697), CLSTN1(ENSG00000171603), CEACAM1(ENSG00000079385), FPR2(ENSG00000171049), FKBP2(ENSG00000173486), CHDH(ENSG00000016391), FAM126B(ENSG00000155744), HTR1A(ENSG00000178394), GLT8D2(ENSG00000120820), GATM(ENSG00000171766), FLNC(ENSG00000128591), DIAPH1(ENSG00000131504), CA12(ENSG00000074410), DPP10(ENSG00000175497), DGKQ(ENSG00000145214), GBP2(ENSG00000162645), LRRC37B(ENSG00000185158), AP3M1(ENSG00000185009), ANKRD27(ENSG00000105186), ANO8(ENSG00000074855), ARRB1(ENSG00000137486), C5AR2(ENSG00000134830), EBP(ENSG00000147155), HSD3B7(ENSG00000099377), SMPD4(ENSG00000136699), SLC16A6(ENSG00000108932), GFRA2(ENSG00000168546), GNG12(ENSG00000172380), GLRA2(ENSG00000101958), NIPA2(ENSG00000140157), DPY19L1(ENSG00000173852), RPS6KC1(ENSG00000136643), TRIM13(ENSG00000204977), PLSCR4(ENSG00000114698), SLC25A17(ENSG00000100372), PTPRG(ENSG00000144724), SGIP1(ENSG00000118473), PSD4(ENSG00000125637), PHLPP2(ENSG00000040199), EHD4(ENSG00000103966), SLC44A2(ENSG00000129353), AOC3(ENSG00000131471), ELMO2(ENSG00000062598), LDLRAD2(ENSG00000187942), PI4KA(ENSG00000241973), CACNB2(ENSG00000165995), TGFBR3(ENSG00000069702), PALM(ENSG00000099864), VEPH1(ENSG00000197415), GOLGA2(ENSG00000167110), AATK(ENSG00000181409), TRPM2(ENSG00000142185), RMC1(ENSG00000141452), SERAC1(ENSG00000122335), C2orf88(ENSG00000187699), GOPC(ENSG00000047932), RAB29(ENSG00000117280), TMEM171(ENSG00000157111), FAM126B(ENSG00000155744), GATM(ENSG00000171766), CD99(ENSG00000002586), CA12(ENSG00000074410), GBP2(ENSG00000162645), AP3M1(ENSG00000185009), ARRB1(ENSG00000137486), RPS6KC1(ENSG00000136643), CACNB2(ENSG00000165995), TNFSF12(ENSG00000239697), TYR(ENSG00000077498), DCT(ENSG00000080166), ZC4H2(ENSG00000126970), RYK(ENSG00000163785), PMEL(ENSG00000185664), CYB561A3(ENSG00000162144), FAM210A(ENSG00000177150), MALL(ENSG00000144063), BST1(ENSG00000109743), HSD3B7(ENSG00000099377), SYT13(ENSG00000019505), SVEP1(ENSG00000165124), KCNQ4(ENSG00000117013), SORD(ENSG00000140263), MME(ENSG00000196549), SPRED1(ENSG00000166068), TBCD(ENSG00000141556), FCER1A(ENSG00000179639), GCHFR(ENSG00000137880), AADAC(ENSG00000114771), FAM210A(ENSG00000177150), FMO3(ENSG00000007933), ABCB4(ENSG00000005471), FES(ENSG00000182511), KMO(ENSG00000117009), BCL2L10(ENSG00000137875), UGCG(ENSG00000148154), ENPEP(ENSG00000138792), CTSL(ENSG00000135047), HSD11B1(ENSG00000117594), IGFLR1(ENSG00000126246), SLC10A1(ENSG00000100652), ZAP70(ENSG00000115085), KDR(ENSG00000128052), MAPT(ENSG00000186868), TGFBR3(ENSG00000069702), KIRREL1(ENSG00000183853),
KSR2(ENSG00000171435), MRGPRF(ENSG00000172935), PTH2R(ENSG00000144407), PRKAR2B(ENSG00000005249), RMC1(ENSG00000141452), SNCA(ENSG00000145335), RYK(ENSG00000163785), SLC35B1(ENSG00000121073), CD99(ENSG00000002586), AQP1(ENSG00000240583), LIMS2(ENSG00000072163), ITGA8(ENSG00000077943), VNN1(ENSG00000112299), ABCD4(ENSG00000119688), UBE2J1(ENSG00000198833), SLC5A2(ENSG00000140675), SLC34A3(ENSG00000198569), NEGR1(ENSG00000172260), PTH1R(ENSG00000160801), PTPRD(ENSG00000153707), MPP6(ENSG00000105926), SLC34A1(ENSG00000131183), PRICKLE1(ENSG00000139174), KIRREL3(ENSG00000149571), XPNPEP2(ENSG00000122121), VAC14(ENSG00000103043), QTRT1(ENSG00000213339), TSPAN13(ENSG00000106537), TTC7B(ENSG00000165914), SLC13A3(ENSG00000158296), RAB29(ENSG00000117280), PEAR1(ENSG00000187800), PRRT3(ENSG00000163704), OPRD1(ENSG00000116329), ADCY7(ENSG00000121281), FAM151A(ENSG00000162391), CREB3L2(ENSG00000182158), TM7SF2(ENSG00000149809), L1CAM(ENSG00000198910), BSND(ENSG00000162399), MPP1(ENSG00000130830), COX7B(ENSG00000131174), AP1S3(ENSG00000152056), EPB41L3(ENSG00000082397), ABCC5(ENSG00000114770), SLC43A2(ENSG00000167703), NDUFS1(ENSG00000023228), GAL3ST1(ENSG00000128242), CHL1(ENSG00000134121), TCTN2(ENSG00000168778), CAP2(ENSG00000112186), TLN2(ENSG00000171914), SGCB(ENSG00000163069), BVES(ENSG00000112276), P2RX6(ENSG00000099957), P2RY6(ENSG00000171631), LANCL2(ENSG00000132434), SIPA1(ENSG00000213445), TBC1D3(ENSG00000274611), SLC25A25(ENSG00000148339), CNTN3(ENSG00000113805), CKMT2(ENSG00000131730), CACNA2D1(ENSG00000153956), FNDC5(ENSG00000160097), SLC2A4(ENSG00000181856), HHATL(ENSG00000010282), CAMK2B(ENSG00000058404), ABHD16A(ENSG00000204427), DMD(ENSG00000198947), CPT1B(ENSG00000205560), AKAP6(ENSG00000151320), NCAM1(ENSG00000149294), MLIP(ENSG00000146147), VPS33B(ENSG00000184056), SCNN1D(ENSG00000162572), NUS1(ENSG00000153989), ZC4H2(ENSG00000126970), RNFT2(ENSG00000135119), MALL(ENSG00000144063), ARRDC1(ENSG00000197070), MTNR1B(ENSG00000134640), FAM234B(ENSG00000084444), SHISAL2B(ENSG00000145642), CD82(ENSG00000085117), CADPS(ENSG00000163618), STIMATE(ENSG00000213533), MED28(ENSG00000118579), NEURL1(ENSG00000107954), CDC42EP1(ENSG00000128283), TJAP1(ENSG00000137221), TMEM138(ENSG00000149483), TMEM237(ENSG00000155755), SLC7A6(ENSG00000103064), ATP8B2(ENSG00000143515), SLC46A1(ENSG00000076351), ST3GAL6(ENSG00000064225), LPCAT2(ENSG00000087253), SLC6A6(ENSG00000131389), PEX1(ENSG00000127980), PEMT(ENSG00000133027), NPDC1(ENSG00000107281), NTRK1(ENSG00000198400), GOLGA8B(ENSG00000215252), GRIK2(ENSG00000164418), PCDHGA10(ENSG00000253846), HRAS(ENSG00000174775), PILRA(ENSG00000085514), PKHD1L1(ENSG00000205038), USP8(ENSG00000138592), YIF1B(ENSG00000167645), RHBDL2(ENSG00000158315), SLC25A20(ENSG00000178537), PLA2G2A(ENSG00000188257), KRAS(ENSG00000133703), STXBP6(ENSG00000168952), NRAS(ENSG00000213281), TENM3(ENSG00000218336), STXBP3(ENSG00000116266), TAOK2(ENSG00000149930), MITD1(ENSG00000158411), PRSS8(ENSG00000052344), GNPNAT1(ENSG00000100522), LRRC55(ENSG00000183908), NUTF2(ENSG00000102898), KCNQ1(ENSG00000053918), NECTIN1(ENSG00000110400), NALCN(ENSG00000102452), SLC51B(ENSG00000186198), SLC43A3(ENSG00000134802), SELENOT(ENSG00000198843), SLC9A1(ENSG00000090020), ST7(ENSG00000004866), SNTA1(ENSG00000101400), TUB(ENSG00000166402), TEX264(ENSG00000164081), ZNRF1(ENSG00000186187), TMEM69(ENSG00000159596), ZFYVE9(ENSG00000157077), SLC35A3(ENSG00000117620), PCDH1(ENSG00000156453), RNF125(ENSG00000101695), QPCTL(ENSG00000011478), SLC45A4(ENSG00000022567), RAB27A(ENSG00000069974), SLC12A6(ENSG00000140199), PARD3B(ENSG00000116117), SMIM6(ENSG00000259120), MIA3(ENSG00000154305), STK17B(ENSG00000081320), SSTR1(ENSG00000139874), TMEM204(ENSG00000131634), SNX18(ENSG00000178996), PIK3R5(ENSG00000141506), RHOU(ENSG00000116574), SLC4A5(ENSG00000188687), MSMO1(ENSG00000052802), TMIGD2(ENSG00000167664), TYRO3(ENSG00000092445), PRKCZ(ENSG00000067606), EMC9(ENSG00000100908), FAM83B(ENSG00000168143), FKRP(ENSG00000181027), FMO5(ENSG00000131781), EMC6(ENSG00000127774), KCTD3(ENSG00000136636), GOLPH3(ENSG00000113384), ATP2C2(ENSG00000064270), ABCG2(ENSG00000118777), EPHB3(ENSG00000182580), DGKE(ENSG00000153933), CYP4F11(ENSG00000171903), GBF1(ENSG00000107862), DMTN(ENSG00000158856), GOLGA8A(ENSG00000175265), WDPCP(ENSG00000143951), CNR1(ENSG00000118432), ARFGEF3(ENSG00000112379), CARMIL2(ENSG00000159753), CHMP5(ENSG00000086065), KPNA2(ENSG00000182481), GPR82(ENSG00000171657), IGSF11(ENSG00000144847), IL17RC(ENSG00000163702), EVA1B(ENSG00000142694), LPP(ENSG00000145012), EPHA10(ENSG00000183317), FERMT1(ENSG00000101311), ABCA10(ENSG00000154263), DTX3L(ENSG00000163840), CYB561(ENSG00000008283), AVEN(ENSG00000169857), CXADR(ENSG00000154639), GRAMD1A(ENSG00000089351), B3GNT7(ENSG00000156966), CHMP2B(ENSG00000083937), ALDH3A2(ENSG00000072210), NISCH(ENSG00000010322), GIPC1(ENSG00000123159), FUT3(ENSG00000171124), GLUL(ENSG00000135821), IL17RE(ENSG00000163701), MARCKSL1(ENSG00000175130), EFHD2(ENSG00000142634), FUT6(ENSG00000156413), GPER1(ENSG00000164850), HCN3(ENSG00000143630), MBTPS1(ENSG00000140943), JAML(ENSG00000160593), GPC1(ENSG00000063660), LZTR1(ENSG00000099949), NEU4(ENSG00000204099), MUC4(ENSG00000145113), NAPEPLD(ENSG00000161048), IL4R(ENSG00000077238), STX5(ENSG00000162236), S100A9(ENSG00000163220), ARHGEF1(ENSG00000076928), GPC5(ENSG00000179399), DCBLD1(ENSG00000164465), CLIC2(ENSG00000155962), TMEM243(ENSG00000135185), TJAP1(ENSG00000137221), TMEM138(ENSG00000149483), TMEM237(ENSG00000155755), RXFP1(ENSG00000171509), SLC5A6(ENSG00000138074), SLC6A6(ENSG00000131389), GRIK2(ENSG00000164418), TMEM40(ENSG00000088726), LYPD3(ENSG00000124466), SLC8A1(ENSG00000183023), SLC43A3(ENSG00000134802), SLC9A1(ENSG00000090020), SNTA1(ENSG00000101400), SRC(ENSG00000197122), TUB(ENSG00000166402), ZNRF1(ENSG00000186187), TMEM69(ENSG00000159596), THBD(ENSG00000178726), SLC35A3(ENSG00000117620), RNF125(ENSG00000101695), TMTC4(ENSG00000125247), QPCTL(ENSG00000011478), PARD3B(ENSG00000116117), SNX18(ENSG00000178996), LY6D(ENSG00000167656), S100A9(ENSG00000163220), MSMO1(ENSG00000052802), EMC9(ENSG00000100908), FAM83B(ENSG00000168143), FRS3(ENSG00000137218), EPHB3(ENSG00000182580), DMTN(ENSG00000158856), ARFGEF3(ENSG00000112379), KPNA2(ENSG00000182481), EVA1B(ENSG00000142694), LPP(ENSG00000145012), EPHA10(ENSG00000183317), FERMT1(ENSG00000101311), ABCA10(ENSG00000154263), CDH5(ENSG00000179776), AVEN(ENSG00000169857), CXADR(ENSG00000154639), ORAI1(ENSG00000276045), ALDH3A2(ENSG00000072210), NISCH(ENSG00000010322), MARCKSL1(ENSG00000175130), GPER1(ENSG00000164850), TACR1(ENSG00000115353), GPC1(ENSG00000063660), TMEM243(ENSG00000135185), NTRK1(ENSG00000198400), GOLGA8B(ENSG00000215252), PKHD1L1(ENSG00000205038), STXBP3(ENSG00000116266), LRRC55(ENSG00000183908), KCNQ1(ENSG00000053918), NECTIN1(ENSG00000110400), ST7(ENSG00000004866), SMIM6(ENSG00000259120), RHOU(ENSG00000116574), TYRO3(ENSG00000092445), KCTD3(ENSG00000136636), ATP2C2(ENSG00000064270), GPC5(ENSG00000179399), GBF1(ENSG00000107862), FAT2(ENSG00000086570), GOLGA8A(ENSG00000175265), CARMIL2(ENSG00000159753), FAM241B(ENSG00000171224), IL17RC(ENSG00000163702), GIPC1(ENSG00000123159), TECR(ENSG00000099797), TMCC1(ENSG00000172765), SLC8A1(ENSG00000183023), RFTN1(ENSG00000131378), TM4SF4(ENSG00000169903), CYP2W1(ENSG00000073067), CACNA1A(ENSG00000141837), CYP4F3(ENSG00000186529),
EPHX1(ENSG00000143819), CYP2A6(ENSG00000255974), ATP5F1C(ENSG00000165629), CYP4F2(ENSG00000186115), CDH5(ENSG00000179776), CYP2A13(ENSG00000197838), CYP2E1(ENSG00000130649), EPB41L5(ENSG00000115109), KCNJ11(ENSG00000187486), MTCH2(ENSG00000109919), PDGFRB(ENSG00000113721), TRPV6(ENSG00000165125), MCAM(ENSG00000076706), NEU3(ENSG00000162139), KCNAB1(ENSG00000169282), LDLRAD3(ENSG00000179241), SMIM18(ENSG00000253457), SORT1(ENSG00000134243), ZBED3(ENSG00000132846), FAM241B(ENSG00000171224), GPRC5B(ENSG00000167191), GPR153(ENSG00000158292), NFXL1(ENSG00000170448), KIAA0040(ENSG00000235750), STRA6(ENSG00000137868), RGS16(ENSG00000143333), VPS26B(ENSG00000151502), RASA4(ENSG00000105808), SRC(ENSG00000197122), SLC52A3(ENSG00000101276), TMEM184A(ENSG00000164855), SNORC(ENSG00000182600), SLC23A1(ENSG00000170482), TMEM242(ENSG00000215712), GJA5(ENSG00000265107), SLC7A8(ENSG00000092068), SLC25A31(ENSG00000151475), ATP12A(ENSG00000075673), NXPE2(ENSG00000204361), SLC14A1(ENSG00000141469), TMEM106B(ENSG00000106460), SUSD3(ENSG00000157303), PITPNM1(ENSG00000110697), RYR2(ENSG00000198626), TMEM119(ENSG00000183160), PPM1L(ENSG00000163590), FAM168B(ENSG00000152102), ATP1A3(ENSG00000105409), ATP2A2(ENSG00000174437), CAV3(ENSG00000182533), ORAI1(ENSG00000276045), KIAA1109(ENSG00000138688), RHBDD2(ENSG00000005486), TMTC4(ENSG00000125247), GDAP1(ENSG00000104381), FZD5(ENSG00000163251), CD300A(ENSG00000167851), STXBP1(ENSG00000136854), GCSAM(ENSG00000174500), DGKZ(ENSG00000149091), SELENOK(ENSG00000113811), ATP11B(ENSG00000058063), KDELR3(ENSG00000100196), MYOC(ENSG00000034971), TMEM60(ENSG00000135211), SLC47A1(ENSG00000142494), SH3BP4(ENSG00000130147), SLC19A3(ENSG00000135917), RNF144B(ENSG00000137393), SYBU(ENSG00000147642), MYORG(ENSG00000164976), MCOLN1(ENSG00000090674), SLC16A14(ENSG00000163053), RAB43(ENSG00000172780), TMEM219(ENSG00000149932), CRK(ENSG00000167193), BMPR1A(ENSG00000107779), KCNMA1(ENSG00000156113), ABCG8(ENSG00000143921), BCL2(ENSG00000171791), ANPEP(ENSG00000166825), NIPAL4(ENSG00000172548), HPS6(ENSG00000166189), ILK(ENSG00000166333), IL10RB(ENSG00000243646), MXRA7(ENSG00000182534), ENPP1(ENSG00000197594), F2R(ENSG00000181104), MCOLN1(ENSG00000090674), SLC16A14(ENSG00000163053), CRK(ENSG00000167193), ATRAID(ENSG00000138085), ABCG8(ENSG00000143921), SH3BP4(ENSG00000130147), ARHGAP21(ENSG00000107863), TMEM219(ENSG00000149932), BCL2(ENSG00000171791), BBS1(ENSG00000174483), APLNR(ENSG00000134817), RAB17(ENSG00000124839), ENPP1(ENSG00000197594), PEX11G(ENSG00000104883), AKR1A1(ENSG00000117448), CYP2B6(ENSG00000197408), AP1S2(ENSG00000182287), BBS1(ENSG00000174483), ASPHD1(ENSG00000174939), F2R(ENSG00000181104), SREBF1(ENSG00000072310), VASN(ENSG00000168140), AIF1L(ENSG00000126878), ABCC1(ENSG00000103222), DYSF(ENSG00000135636), MGAM(ENSG00000257335), TMEM52B(ENSG00000165685), ATP6V1D(ENSG00000100554), UST(ENSG00000111962), RUFY3(ENSG00000018189), ARHGAP21(ENSG00000107863), AP4M1(ENSG00000221838), ATRAID(ENSG00000138085), CLIC4(ENSG00000169504), ANK2(ENSG00000145362), ST8SIA2(ENSG00000140557), PAM(ENSG00000145730), SLC26A4(ENSG00000091137), CSK(ENSG00000103653), CYP4X1(ENSG00000186377), ZDHHC2(ENSG00000104219), SLC30A7(ENSG00000162695), SFT2D2(ENSG00000213064), TMEM74B(ENSG00000125895), TNFSF14(ENSG00000125735), TTC17(ENSG00000052841), ACY3(ENSG00000132744), CHST11(ENSG00000171310), FIBCD1(ENSG00000130720), ZGRF1(ENSG00000138658), SRI(ENSG00000075142), SLC26A2(ENSG00000155850), SFXN5(ENSG00000144040), NDUFS8(ENSG00000110717), PARD3(ENSG00000148498), PLPP1(ENSG00000067113), RHOH(ENSG00000168421), PIGR(ENSG00000162896), TPCN1(ENSG00000186815), TULP3(ENSG00000078246), TJP3(ENSG00000105289), TCIRG1(ENSG00000110719), PIGU(ENSG00000101464), RAP1GAP(ENSG00000076864), MFSD10(ENSG00000109736), SEL1L3(ENSG00000091490), SERP1(ENSG00000120742), SCARA3(ENSG00000168077), NECAPl(ENSG00000089818), PLIN2(ENSG00000147872), ABCC3(ENSG00000108846), GPR183(ENSG00000169508), SLC24A3(ENSG00000185052), MACF1(ENSG00000127603), MGST2(ENSG00000085871), DENND5B(ENSG00000170456), MEGF8(ENSG00000105429), PNKD(ENSG00000127838), SERP2(ENSG00000151778), TNFAIP8L3(ENSG00000183578), SLC3A1(ENSG00000138079), VPS28(ENSG00000160948), TMEM64(ENSG00000180694), TSPAN31(ENSG00000135452), TNFRSF14(ENSG00000157873), TMEM201(ENSG00000188807), MCUR1(ENSG00000050393), SUSD6(ENSG00000100647), RAB31(ENSG00000168461), TRPM4(ENSG00000130529), VTI1B(ENSG00000100568), TNFRSF10A(ENSG00000104689), TMEM164(ENSG00000157600), STK38L(ENSG00000211455), IMMT(ENSG00000132305), ADCK2(ENSG00000133597), ATG2B(ENSG00000066739), CCR10(ENSG00000184451), GPC4(ENSG00000076716), CX3CR1(ENSG00000168329), DPY19L4(ENSG00000156162), SLC48A1(ENSG00000211584), CLEC16A(ENSG00000038532), FCER1G(ENSG00000158869), DMXL2(ENSG00000104093), FAR2(ENSG00000064763), CLN6(ENSG00000128973), CTNND1(ENSG00000198561), FXYD6(ENSG00000137726), ARL8B(ENSG00000134108), ELOVL1(ENSG00000066322), SLC37A4(ENSG00000137700), HRH1(ENSG00000196639), GJA4(ENSG00000187513), GALNT16(ENSG00000100626), DENND5A(ENSG00000184014), ALG2(ENSG00000119523), CLDND1(ENSG00000080822), CYP20A1(ENSG00000119004), B3GNT6(ENSG00000198488), TMEM30B(ENSG00000182107), AGPS(ENSG00000018510), CASD1(ENSG00000127995), ABCD3(ENSG00000117528), MPZL1(ENSG00000197965), NBAS(ENSG00000151779), SLC2A10(ENSG00000197496), APOOL(ENSG00000155008), HIGD1A(ENSG00000181061), MT-ND4(ENSG00000198886), MFSD2A(ENSG00000168389), PDLIM4(ENSG00000131435), RNF144A(ENSG00000151692), PIGS(ENSG00000087111), CTXN2(ENSG00000233932), AP3S1(ENSG00000177879), CD63(ENSG00000135404), AP3S2(ENSG00000157823), CACNA1C(ENSG00000151067), CAVIN2(ENSG00000168497), ZDHHC2(ENSG00000104219), ACER3(ENSG00000078124), CHST11(ENSG00000171310), TULP3(ENSG00000078246), ITGA9(ENSG00000144668), PLIN2(ENSG00000147872), ABCC3(ENSG00000108846), GPR183(ENSG00000169508), MGST2(ENSG00000085871), PNKD(ENSG00000127838), TMEM260(ENSG00000070269), UBR4(ENSG00000127481), VTI1B(ENSG00000100568), TMEM164(ENSG00000157600), DMXL2(ENSG00000104093), ARL8A(ENSG00000143862), TESC(ENSG00000088992), CTNND1(ENSG00000198561), ARL8B(ENSG00000134108), ELOVL1(ENSG00000066322), ANKRD13A(ENSG00000076513), GALNT16(ENSG00000100626), COL13A1(ENSG00000197467), AGPS(ENSG00000018510), ABCD3(ENSG00000117528), MPZL1(ENSG00000197965), NBAS(ENSG00000151779), APOOL(ENSG00000155008), MFSD2A(ENSG00000168389), TCIRG1(ENSG00000110719), RAP1GAP(ENSG00000076864), SEL1L3(ENSG00000091490), MERTK(ENSG00000153208), VPS28(ENSG00000160948), MCUR1(ENSG00000050393), B3GNT5(ENSG00000176597), FAR2(ENSG00000064763), SLC37A4(ENSG00000137700), SLC2A11(ENSG00000133460), MERTK(ENSG00000153208), TMEM260(ENSG00000070269), ZDHHC8(ENSG00000099904), UBR4(ENSG00000127481), TSC2(ENSG00000103197), SERINC1(ENSG00000111897), EVA1A(ENSG00000115363), B3GNT5(ENSG00000176597), TESC(ENSG00000088992), CDH2(ENSG00000170558), ABCA8(ENSG00000141338), SLC31A1(ENSG00000136868), CMTM8(ENSG00000170293), CYTH2(ENSG00000105443), GRB14(ENSG00000115290), GK(ENSG00000198814), POMGNT1(ENSG00000085998), ACER3(ENSG00000078124), RDX(ENSG00000137710), PDGFC(ENSG00000145431), NOXA1(ENSG00000188747), UCHL1(ENSG00000154277), ITGA9(ENSG00000144668), PLCD4(ENSG00000115556), TMPRSS2(ENSG00000184012), SLC25A23(ENSG00000125648), JAM3(ENSG00000166086), ANKRD13A(ENSG00000076513), ACKR3(ENSG00000144476), TMEM63B(ENSG00000137216), HAS3(ENSG00000103044), KCNK5(ENSG00000164626), SLC2A11(ENSG00000133460),
NTRK3(ENSG00000140538), PTPRB(ENSG00000127329), BCL2L13(ENSG00000099968), ICA1(ENSG00000003147), GPR63(ENSG00000112218), AHCYL1(ENSG00000168710), LMAN2(ENSG00000169223), ARL8A(ENSG00000143862), CLCN5(ENSG00000171365), ENO2(ENSG00000111674), CHRM3(ENSG00000133019), TMEM128(ENSG00000132406), COL13A1(ENSG00000197467), ARFGAP3(ENSG00000242247), SLC16A7(ENSG00000118596), TMEM263(ENSG00000151135), SEMA5A(ENSG00000112902), SLC26A1(ENSG00000145217), ADIPOR2(ENSG00000006831), SLC39A2(ENSG00000165794), EFHD1(ENSG00000115468), ABCG1(ENSG00000160179), ADGRA3(ENSG00000152990), ANKFY1(ENSG00000185722), BIK(ENSG00000100290), VIPR2(ENSG00000106018), TMEM43(ENSG00000170876), CAVIN1(ENSG00000177469), CDH11(ENSG00000140937), FCAR(ENSG00000186431), CAV1(ENSG00000105974), ANXA1(ENSG00000135046), VIPR2(ENSG00000106018), TMEM263(ENSG00000151135), SEMA5A(ENSG00000112902), TMEM43(ENSG00000170876), CLCA2(ENSG00000137975), CAVIN1(ENSG00000177469), ADGRA3(ENSG00000152990), GJA1(ENSG00000152661), CAV1(ENSG00000105974), ANXA1(ENSG00000135046), SLC26A1(ENSG00000145217), ADIPOR2(ENSG00000006831), GAA(ENSG00000171298), ZDHHC6(ENSG00000023041), ITGB1(ENSG00000150093), GJA1(ENSG00000152661), COL6A2(ENSG00000142173), KCNJ1(ENSG00000151704), UPK3BL2(ENSG00000284981), TMEM255B(ENSG00000184497), UPK3BL1(ENSG00000267368), ABHD17C(ENSG00000136379), TRPV4(ENSG00000111199), CFC1(ENSG00000136698), RNF215(ENSG00000099999), MAST2(ENSG00000086015), VSTM5(ENSG00000214376), C2CD2L(ENSG00000172375), PHKA1(ENSG00000067177), IFFO1(ENSG00000010295), MARCKS(ENSG00000277443), SLC6A14(ENSG00000268104), RNF103(ENSG00000239305), C2CD2L(ENSG00000172375), IGSF8(ENSG00000162729), PHKA1(ENSG00000067177), MARCKS(ENSG00000277443), SLC6A14(ENSG00000268104), SLC25A33(ENSG00000171612), XKR9(ENSG00000221947), SLC25A33(ENSG00000171612), AKAP12(ENSG00000131016), XKR9(ENSG00000221947), PPP1R3A(ENSG00000154415), TMEM245(ENSG00000106771), TEX2(ENSG00000136478), SCD5(ENSG00000145284), RRAD(ENSG00000166592), SNX1(ENSG00000028528), SMPD2(ENSG00000135587), MSRA(ENSG00000175806), MFN2(ENSG00000116688), UTRN(ENSG00000152818), ARHGEF12(ENSG00000196914), FGFRL1(ENSG00000127418), GABARAPL1(ENSG00000139112), FMNL3(ENSG00000161791), CLN5(ENSG00000102805), GNAI3(ENSG00000065135), GNAI1(ENSG00000127955), DAPP1(ENSG00000070190), ICAM1(ENSG00000090339), SNX1(ENSG00000028528), GNAI3(ENSG00000065135), ARHGEF12(ENSG00000196914), GNAI1(ENSG00000127955), FMNL3(ENSG00000161791), CLN5(ENSG00000102805), CLEC2B(ENSG00000110852), NDUFAF5(ENSG00000101247), CLEC2B(ENSG00000110852), LRIG1(ENSG00000144749), TSPAN33(ENSG00000158457), MRC2(ENSG00000011028), ARMCX2(ENSG00000184867), DAG1(ENSG00000173402), LRRC24(ENSG00000254402), TMED6(ENSG00000157315), SCN4B(ENSG00000177098), DST(ENSG00000151914), SLC22A16(ENSG00000004809), SPIRE1(ENSG00000134278), SIRPB1(ENSG00000101307), PVR(ENSG00000073008), SLC25A36(ENSG00000114120), PCDHB15(ENSG00000113248), SNX7(ENSG00000162627), SLC11A1(ENSG00000018280), MPC2(ENSG00000143158), MGLL(ENSG00000074416), ITPR2(ENSG00000123104), MFSD11(ENSG00000092931), RINT1(ENSG00000135249), TMEM86A(ENSG00000151117), SLC38A5(ENSG00000017483), SUSD1(ENSG00000106868), REEP4(ENSG00000168476), KCNMB3(ENSG00000171121), HHAT(ENSG00000054392), CDK14(ENSG00000058091), APOBR(ENSG00000184730), ADCK5(ENSG00000173137), TMEM37(ENSG00000171227), ATP8B1(ENSG00000081923), LFNG(ENSG00000106003), MRAP(ENSG00000170262), NDUFB9(ENSG00000147684), PAG1(ENSG00000076641), VAT1(ENSG00000108828), SPIRE1(ENSG00000134278), VAT1(ENSG00000108828), MGLL(ENSG00000074416), TMEM86A(ENSG00000151117), APOBR(ENSG00000184730), ATP8B1(ENSG00000081923), SCN4B(ENSG00000177098), SLC11A1(ENSG00000018280), MPC2(ENSG00000143158), ITPR2(ENSG00000123104), REEP4(ENSG00000168476), CCND1(ENSG00000110092), SLC38A9(ENSG00000177058), KCNJ16(ENSG00000153822), NPHS1(ENSG00000161270), GREB1(ENSG00000196208), DAB2(ENSG00000153071), ACVRL1(ENSG00000139567), ATG9A(ENSG00000198925), FXYD7(ENSG00000221946), FKBP11(ENSG00000134285), TSPAN12(ENSG00000106025), TBC1D9B(ENSG00000197226), TSPAN3(ENSG00000140391), SNX4(ENSG00000114520), SMAGP(ENSG00000170545), C2CD2(ENSG00000157617), PLPP2(ENSG00000141934), TREM2(ENSG00000095970), TMEM94(ENSG00000177728), PLXNA1(ENSG00000114554), SLC25A46(ENSG00000164209), RNF5(ENSG00000204308), NAGPA(ENSG00000103174), NBEA(ENSG00000172915), TFPI(ENSG00000003436), RAB20(ENSG00000139832), RASD2(ENSG00000100302), SPCS3(ENSG00000129128), MGAT1(ENSG00000131446), KCNK1(ENSG00000135750), POMT2(ENSG00000009830), HEG1(ENSG00000173706), ILDR1(ENSG00000145103), LYPLA1(ENSG00000120992), TMEM159(ENSG00000011638), NUCB2(ENSG00000070081), VPS11(ENSG00000160695), SIGIRR(ENSG00000185187), TMEM53(ENSG00000126106), SLC19A2(ENSG00000117479), TECPR1(ENSG00000205356), VPS41(ENSG00000006715), FKTN(ENSG00000106692), FAM171A1(ENSG00000148468), GCNT3(ENSG00000140297), B4GALT4(ENSG00000121578), CACNA1B(ENSG00000148408), DOK7(ENSG00000175920), FZD2(ENSG00000180340), HLA-DQB1(ENSG00000179344), CLMN(ENSG00000165959), COQ2(ENSG00000173085), C6orf89(ENSG00000198663), DGAT1(ENSG00000185000), LIME1(ENSG00000203896), MALRD1(ENSG00000204740), ERBIN(ENSG00000112851), CHPF2(ENSG00000033100), SLC25A13(ENSG00000004864), ATL2(ENSG00000119787), CLCA4(ENSG00000016602), COG8(EENNSSGG0000000000221732368107), ANKRD46(ENSG00000186106), ATRN(ENSG00000088812), ADGRL1(ENSG00000072071), CDH26(ENSG00000124215), UGT8(ENSG00000174607), KCNA5(ENSG00000130037), GLCE(ENSG00000138604), SLC16A9(ENSG00000165449), KCNK10(ENSG00000100433), NOD2(ENSG00000167207), SLC16A4(ENSG00000168679), ITSN1(ENSG00000205726), CERS4(ENSG00000090661), SMAGP(ENSG00000170545), MIEF2(ENSG00000177427), TFPI(ENSG00000003436), SPCS3(ENSG00000129128), RNF139(ENSG00000170881), SUSD4(ENSG00000143502), NUCB2(ENSG00000070081), VPS11(ENSG00000160695), DOK7(ENSG00000175920), FZD2(ENSG00000180340), MALRD1(ENSG00000204740), ATRN(ENSG00000088812), BBS5(ENSG00000163093), SLC16A9(ENSG00000165449), VDAC3(ENSG00000078668), LRP1(ENSG00000123384), VAMP1(ENSG00000139190), SNX19(ENSG00000120451), SLC35E1(ENSG00000127526), COX14(ENSG00000178449), CYP26B1(ENSG00000003137), RNF139(ENSG00000170881), MAGI2(ENSG00000187391), CAPN2(ENSG00000162909), SMIM1(ENSG00000235169), MIEF2(ENSG00000177427), SRD5A3(ENSG00000128039), ATP6V1B1(ENSG00000116039), SRPRB(ENSG00000144867), TRPV5(ENSG00000127412), EMC10(ENSG00000161671), CDIPT(ENSG00000103502), SLC2A5(ENSG00000142583), CPM(ENSG00000135678), BBS5(ENSG00000163093), PDZD3(ENSG00000172367), SEZ6L2(ENSG00000174938), PRIMA1(ENSG00000175785), RHOA(ENSG00000067560), SUSD4(ENSG00000143502), KIFC3(ENSG00000140859), ENTPD1(ENSG00000138185), FIBP(ENSG00000172500), NLGN1(ENSG00000169760), CCR4(ENSG00000183813), SDR16C5(ENSG00000170786), RDH13(ENSG00000160439), RAB28(ENSG00000157869), PRKN(ENSG00000185345), PLPPR2(ENSG00000105520), TMEM106C(ENSG00000134291), VAMP5(ENSG00000168899), TOMM40L(ENSG00000158882), TMX2(ENSG00000213593), TSNARE1(ENSG00000171045), GRAP(ENSG00000154016), FAM162A(ENSG00000114023), AFG1L(ENSG00000135537), COMTD1(ENSG00000165644), PYCARD(ENSG00000103490), MAPK8IP1(ENSG00000121653), CAV2(ENSG00000105971), PPP1R16B(ENSG00000101445), SDR16C5(ENSG00000170786), RAB28(ENSG00000157869), TMX2(ENSG00000213593), TSNARE1(ENSG00000171045), CAV2(ENSG00000105971), MAP1LC3B(ENSG00000140941), GRAP(ENSG00000154016), FAM162A(ENSG00000114023), AFG1L(ENSG00000135537),
COMTD1(ENSG00000165644), PYCARD(ENSG00000103490), MAPK8IP1(ENSG00000121653), STBD1(ENSG00000118804), PPP1R16B(ENSG00000101445), MAP1LC3B(ENSG00000140941), RMDN2(ENSG00000115841), PLOD1(ENSG00000083444), SLC22A1(ENSG00000175003), SDCBP2(ENSG00000125775), GBA2(ENSG00000070610), GPR34(ENSG00000171659), Clorf210(ENSG00000253313), EPB41L2(ENSG00000079819), LBR(ENSG00000143815), MMP2(ENSG00000087245), PCDHB5(ENSG00000113209), FGFR2(ENSG00000066468), GPR34(ENSG00000171659), SDCBP2(ENSG00000125775), EPB41L2(ENSG00000079819), RETSAT(ENSG00000042445), FGFR2(ENSG00000066468), PCDHB5(ENSG00000113209), ZC3H12A(ENSG00000163874), IKBIP(ENSG00000166130), NUP54(ENSG00000138750)

### List of All Proteins in the List Above Separately Categorized by Applicable Use

[0415] (Ensembl version 9238 ID for the symbols below can be found in the table above):
[0416] 1. Cancer treated: melanoma
   [0417] a. Tissue protected: Colon AXL, VPS52, SCGN, SLC9A2, PCSK5, SELENBP1, SNX24, SMIM24, SMURF1, NAAA, SEC13, SLC41A2, SOCS7, QRFPR, RPH3AL, RAC1, NFAM1, LDLR, GPR65, RAC3, WSCD1, HTRA1, RAB27B, DLC1, PLCB3, MUC1, PSTPIP2, RAB3B, SDC1, TMEM45A, SPPL3, STYK1, MAPKAP1, IFI27, ITLN1, PTGDR, SGMS1, ITGB6, MUC15, PEX10, OSBPL7, CD46, PROM2, PLPP7, MGAT4A, LRRN2, OBSCN, PROM1, VSIG10, TMEM236, VPS35L, SYTL4, SYTL3, TMEM41A, TSPAN8, UNC13B, SYTL2, TPRA1, OCLN, RNF170, SPHK1, SLC28A3, PTAFR, SYP, PIGZ, PTPRN2, RSAD2, SLC39A14, SLC6A12, SLC6A15, RAB25, SLC20A2, TGFBR1, STK16, TRAF4, SIGLEC14, MTG2, SPTLC3, MARK2, RNF186, TSPAN15, TRAF3IP3, VTCN1, TAS2R38, TMEM39B, CA2, CDHR5, CLDN4, ARL4D, ACVR1B, DPEP1, GSDMB, GPBAR1, SYK, ADCY10, ACSL5, CD177, CLCA1, GLP2R, DSC2, ADGRF1, CLDN5, DSG2, AQP8, CEACAM5, CHST6, CA4, EPCAM, GNG11, CTDNEP1, MAGI1, ENTPD8, FPGS, MAN1C1, FADS2, FER1L6, BEST2, BRI3, CLDN8, GAL3ST2, HTR4, B3GNT8, ELOVL7, B3GALT5, CDHR2, CLDN7, ACE2, CNTNAP3, CDH17, ATP11C, CIB1, ASIC5, DCXR, AKAP10, ARL4C, ANO1, CHST14, ABHD12, C12orf66, ALG14, HTR2B, B3GAT1, HHLA2, MAOA, FGFR4, IBTK, SLC9A3R2, NCEH1, KCNN3, MC4R, MCUB, EPPK1, MSTO1, SLC2A6, KIAA2013, NIPAL1, IL17RA, ITGB4, GPA33, MUC13, OR10R2, PSKH1, NDST2,
   [0418] b. Tissue protected: Lung TGM2, AXL, SLC30A4, VPS52, SLC22A15, SELENBP1, SCEL, SMURF1, NFAM1, AGER, RECK, MUC1, SCTR, ITGB6, CD46, EHD2, PRRG2, RNF170, RSAD2, SLC6A15, RAB25, SLC39A10, TM4SF1, STEAP1, CLDN4, EHD1, GPBAR1, CCR7, CYB5A, ACSL5, CLDN5, AIFM2, LPAR6, FADS2, AIG1, CLDN8, AQP4, CYB561D1, CACNA2D2, ACE, AQP3, CHST14, CADM1, MAOA, IBTK, NCEH1, LAMP3, MC4R, EHD3, NSMF, SLC34A2, PSKH1, LRRK2,
   [0419] c. Tissue protected: Skin VPS52, CLEC10A, PERP, SCEL, SLC41A2, RAC1, RNF145, NFAM1, RAC3, MTMR2, REEP2, TMEM134, SLC10A6, SGMS1, OLFM2, PROM2, KRT1, PLA2G4E, OBSCN, ZP2, SYTL3, TACSTD2, STK16, TRAF3IP3, GJB4, KCNJ8, SYK, FA2H, DSP, CD177, ANO7, CLDN5, EPHA4, CAPNS2, DSC3, GSDMA, FGFBP1, FADS3, FADS2, B3GNT4, DSG1, ADGRF4, ASPRV1, CIB1, DSG3, DCXR, AQP3, CNPPD1, EPPK1, FGFR3, OR10R2, PSKH1, VPS52, MS4A8, MGAT4C, SEC13, TMEM45A, IFI27, ICAM3, PLPP7, PPL, RHCG, TPRA1, RSAD2, S100A8, RAB25, MARK2, CLDN4, DSC2, GPX8, HCN1, CYB561D1, CLEC2A, HTR2B, MAOA, ITGB4, ALOX12, ,
   [0420] d. Tissue protected: Liver VPS52, CLEC10A, PCSK5, PI4KB, ALPL, SELENBP1, ST6GAL1, NAAA, SLC25A40, SLC27A2, SLCO1B3, SLCO1B1, SLC25A43, SLC27A5, SERINC3, NFAM1, LDLR, GPR65, PDZK1, RDH16, SDC1, TMEM45A, SPPL3, MAPKAP1, CD46, LRRN2, SLC25A15, UGT2B4, YIPF1, TFR2, VPS35L, UGT1A6, TNS2, UNC13B, PTAFR, RSAD2, SLC39A14, SLC6A12, TSPAN2, SLC30A10, CA2, ACVR1B, GHR, KCNJ8, CYP2D6, CYB5A, ACSL5, CD177, FYN, GAS2, SLC2A2, CYP2A7, CYP1A2, CYP3A4, CYP4V2, NINJ1, CYP2C8, DHCR24, CTDNEP1, CYP2C19, FADS2, AQP9, AIG1, BRI3, CDHR2, ASGR1, ABCB11, ASIC5, ACAD11, DCXR, ANO1, ASGR2, CYP3A43, INTS2, MAOA, CYP2C9, FGFR4, IBTK, LHFPL2, MFAP3L, MSTO1, SLC2A6, ITGB4, ABCC2, DPP4, PSKH1, NPC1L1,
   [0421] e. Tissue protected: Kidney (glomeruli) SLC9A2, SLC45A1, PODXL, NFAM1, RECK, TPSG1, PECAM1, SCUBE1, PLA2R1, CD46, PROM2, PNPLA3, MAP6, EHD2, NPHS2, TNS2, PRRG2, PTPRO, ARL4D, EHD1, HYAL2, ADGRF1, CD34, CLDN5, EVI2A, ENG, CR1, FADS3, CRB3, SLC9A3R2, EHD3, DPP4, PSKH1,
   [0422] f. Tissue protected: Kidney (tubules) TTYH3, AXL, TRPM3, VPS52, TREH, FCAMR, SLC9A2, TM4SF18, SELPLG, PCSK5, ALPL, SELENBP1, SMIM24, SLC5A12, ST6GAL1, SLC12A1, SMURF1, NAAA, SLC25A40, SLC27A2, SLC41A2, RPH3AL, SLC6A19, SLC22A11, S1PR2, SERINC3, ARHGAP5, NFAM1, LDLR, RHBG, PLLP, WSCD1, VHL, HTRA1, RAB27B, PARVB, DLC1, MUC1, PDZK1, KCNH8, LIN7A, SDC1, MGAT4B, TMEM132E, SPPL3, SCTR, MAPKAP1, SGMS1, MUC15, OSBPL7, CD46, OLFM2, PROM2, NAT8, PNPLA3, MGAT4A, LRRN2, MPP5, SLC25A15, OBSCN, PROM1, UGT2B4, SLC22A6, TMEM72, UGT3A1, VSIG10, ATP6V0A4, SLC7A7, TMEM80, VPS35L, ZP2, UGT1A6, TMEM252, TMEM174, TSPAN8, UNC13B, RHCG, SYTL2, SLC28A1, SLC22A2, OCLN, RNF170, SPHK1, SLC28A3, SCAMP5, PTAFR, SLC22A8, PIGZ, RSAD2, SLC39A14, SLC6A12, RAB25, RAB11FIP5, SLC20A2, SLC6A18, SLC13A2, TGFBR1, TMEM213, SYT7, SPTLC3, SLC4A4, MARK2, TMEM178B, PKHD1, SLC35G2, TSPAN2, VTCN1, TSPAN16, TMEM39B, CA2, CDHR5, ARL4D, ENPP6, GGT1, DPEP1, ENPP3, CUBN, GHR, HYAL2, KCNJ8, GSDMC, SYK, CPNE6, CYB5A, ADCY10, ACSL5, CDH6, GAS2, SLC2A2, CALCR, DSG2, CASR, FOLH1, CNTFR, EPCAM, GNG11, CTDNEP1, LRFN4, MAGI1, FADS2, AQP6, CDC42EP5, CLDN8, CDHR2, CLDN7, SH3BP5, SLC7A9, CLDN10, FXYD2, ACE, CMKLR1, CLDN2, DCXR, AKAP10, ARL4C, ANXA13, AQP3, C12orf66, CYP3A43, CDH16, CADM1, B3GAT1, INTS2, MAOA, FGFR4, MOXD1, LHFPL2, MC4R, KCND1, MCUB, MSTO1, SLC2A6, KIAA2013, NIPAL1, FMO1, LRP2, ALOX12, OR10R2, GRIN2D, NECAP2, NSMF, ABCC2, MDGA2, DPP4, PSKH1, LRRK2, NDST2,
   [0423] g. Tissue protected: Heart (cardiomyocytes) TGM2, TTYH3, SLC30A4, SLC27A6, UCP3, CD36, MGAT4C, RASL10B, SLC22A15, PCSK5, PI4KB, SNX24, SLC4A10, SLC41A2, RNF145, NFAM1, HTRA1, PARVB, POPDC2, PLN, SGCG, SRL, MAPKAP1, SGMS1, ITGB6, OLFM2, PLPP7, DMPK, SLC25A15, OBSCN, YRDC, TMEM143, ZP2, PRRG2, TPRA1, RAB11FIP4, S LC39A14, SLC6A12, SLC20A2, SLCO2B1, TRAF4, MARK2, TMEM178B, TEX261, SCN7A, TSPAN15, TMEM39B, DSP, CDH6, CDH15, DSC2, GNB5, RASGRP2, CAVIN4, DSG2, CHRNA1, CNTFR, CD248, GPAT2, CHST6, CYP4V2, CTDNEP1, LEPROTL1, FADS2, CDC42SE1, CDHR2, ADAM28, CNTNAP3, CSF3R, ATP11C, CDH13, CIB1, ADGRG6, ADRB1, ACAD11, ARL4C, AP4E1, CNPPD1, MAOA, NCEH1, MYZAP, MFAP3L, GPR182, MC4R, KCND1, MSTO1, GPR15, SLC16A10, ITGB4, OR10R2, PRKCA, DES, PSKH1,
   [0424] h. Tissue protected: Thyroid SLC30A4, VPS52, SLC9A2, TMEM100, SLC22A15, SELENBP1, SLC5A5, ST6GAL1, QRFPR, MPP7, RNF145, NFAM1, TPO, MAPKAP1, IFI27, MUC15, OSBPL7, CD46, OLFM2, PSD3, PROM2, MGAT4A, OBSCN, PROM1, VPS35L, SYTL4, SYTL3, TMEM41A, UNC13B, PRRG2, OCLN, RNF170, PTAFR, RSAD2, RAB25, SLC20A2, SLC39A10, TRAF4, MARK2, TSPAN15, TMEM39B, CLDN4, IYD, DUOX1, GHR, KCNJ8, SYK, ADCY10, CDH6, FYN, CLDN5, EPHA4, DSG2, HCN1, IPCEF1, EPCAM, LPAR6, CTDNEP1, MAGI1, FADS2, CLDN8, CLDN7, AAK1, DCXR, AKAP10, AP4E1, CDH16, CADM1, MAOA, IBTK, LHFPL2, LRP1B, MC4R, MSTO1, IL17RA, OR10R2, GRIN2D, PSKH1,
   [0425] i. Tissue protected: Pancreatic endocrine cells (Islets) SCGN, PI4KB, STX1A, NAAA, RTN1, SCG3, VHL, PTGDR2, RAB3B, PTPRN, CD46, MGAT4A, OBSCN, NECAB2, SLC17A6, SV2A, YRDC, TSPAN7, SLC30A8, PRRG2, SYP, PTPRN2, RSAD2, RAB25, SIGLEC14, TEX261, SLC35G2, DGCR2, CDH6, GNAO1, CLDN5, FAM169A, DSG2, CASR, CNTFR, CTDNEP1, CLDN7, ATP9A, CLU, FXYD2, ATP1A2, ASIC5, CADM1, GAD2, ALOX5, MAOA, MC4R, KCND1, MSTO1, OR10R2, MDGA2, DPP4, PSKH1,
   [0426] j. Tissue protected: Pancreatic exocrine cells VPS52, RASL10B, SELPLG, PCSK5, PI4KB, SMURF1, NAAA, SLC4A10, SEC13, RPH3AL, TMEM97, NFAM1, VHL, RAB27B, MUC1, SCTR, IFI27, SGMS1, MUC15, OLFM2, PROM2, MGAT4A, LRRN2, OBSCN, PROM1, VSIG10, YRDC, TMEM80, SYTL4, TSPAN8, SYTL2, TPRA1, OCLN, RNF170, SPHK1, SYCN, SLC28A3, RSAD2, SLC39A14, RAB25, SLC20A2, TM4SF1, SLCO2B1, STK16, MTG2, SPTLC3, SLC4A4, MARK2, PKHD1, SCN7A, TSPAN15, TAS2R38, CA2, CLDN4, ARL4D, ACVR1B, DPEP1, CUZD1, KCNJ8, GP2, SYK, KIRREL2, FA2H, ADCY10, CDH6, DSC2, CLDN5, EVI2A, DSG2, AQP8, CNTFR, GPAT2, CHST6, CYP4V2, LPAR6, CTDNEP1, MAGI1, LEPROTL1, FADS2, CLDN8, ELOVL7, CLDN7, CRB3, ACE2, CFTR, CLDN10, FXYD2, AKAP10, ARL4C, AP4E1, PIK3AP1, CADM1, MAOA, AQP12A, AQP12B, FGFR4, IBTK, MOXD1, MC4R, MCUB, SLC2A6, SLC16A10, IL17RA, OR10R2, PSKH1,
[0427] 2. Cancer treated: lung cancer
   [0428] a. Tissue protected: Colon AXL, UGT2A3, CORO7, GABARAPL2, SCGN, PCSK5, SMIM24, SPCS1, TNFSF12, NAAA, PLEKHA3, TVP23B, WHAMM, DLC1, PLCB3, RAB3B, TMEM45A, SLCO4A1, STYK1, SLC9A3, ITLN1, PTGDR, PEX10, PCDH11X, PALM, PLPP7, VEPH1, CNEP1R1, GOLGA2, OBSCN, AATK, SLC26A3, UGT2B17, VSIG10, SERAC1, TVP23C, UGT2B28, TMEM253, UGT2B15, ARHGAP17, C2orf88, GOPC, SPHK1, PTPRN2, SLC39A14, SLC6A12, SNX6, PHACTR2, NAPG, NAPB, TRAF3IP3, TMEM171, TMEM39B, TMEM30A, CA2, DPEP1, CLSTN1, CLCA1, GLP2R, CEACAM1, FPR2, FKBP2, CHDH, FAM126B, HTR1A, GLT8D2, GATM, FLNC, AQP8, DIAPH1, CA12, CA4, DPP10, DGKQ, GBP2, LRRC37B, MAGI1, ENTPD8, MAN1C1, AP3M1, ANKRD27, ANO8, BEST2, BRI3, GAL3ST2, ELOVL7, CDHR2, ACE2, CNTNAP3, ARRB1, C5AR2, ASIC5, AKAP10, ABHD12, EBP, HSD3B7, ALG14, B3GAT1, IBTK, SMPD4, SLC16A6, GFRA2, MCUB, GNG12, GLRA2, SLC2A6, KIAA2013, NIPA2, NIPAL1, ITGB4, DPY19L1, RPS6KC1, OR10R2, PSKH1,
   [0429] b. Tissue protected: Lung AXL, SLC30A4, TRIM13, PLSCR4, SLC25A17, AGER, TVP23B, WHAMM, RECK, PTPRG, SGIP1, PALM, EHD2, SERAC1, TVP23C, PSD4, PHLPP2, EHD1, EHD4, CCR7, SLC44A2, AOC3, GLT8D2, GBP2, AIFM2, AP3M1, ANKRD27, ELMO2, CACNA2D2, ACE, ARRB1, IBTK, EHD3, NIPA2, LDLRAD2, PI4KA, PSKH1, LRRK2,
   [0430] c. Tissue protected: Skin CACNB2, CLEC10A, TGFBR3, REEP2, PALM, VEPH1, GOLGA2, OBSCN, AATK, TRPM2, RMC1, SERAC1, ZP2, C2orf88, GOPC, RAB29, TRAF3IP3, TMEM171, GJB4, DSP, ANO7, FAM126B, GATM, CD99, CAPNS2, CA12, GBP2, GSDMA, AP3M1, FADS3, B3GNT4, ARRB1, ASPRV1, DSG3, CNPPD1, RPS6KC1, OR10R2, PSKH1, MS4A8, CACNB2, MGAT4C, TNFSF12, TYR, TMEM45A, PLPP7, DCT, ZC4H2, RYK, PMEL, GPX8, CYB561A3, FAM210A, HCN1, MALL, BST1, HSD3B7, ITGB4, ALOX12, ,
   [0431] d. Tissue protected: Liver CACNB2, CLEC10A, TRIM13, SYT13, PCSK5, PI4KB, SVEP1, SPCS1, NAAA, SLC27A2, SLCO1B3, SLCO1B1, SLC27A5, TMEM45A, KCNQ4, VEPH1, SORD, MME, SLC25A15, AATK, SPRED1, UGT2B4, YIPF1, TFR2, SERAC1, TNS2, TBCD, SLC39A14, SLC6A12, TMEM171, CA2, FCER1A, CYP2D6, FYN, GAS2, SLC2A2, HTR1A, CYP2A7, GLT8D2, GATM, CYP1A2, GCHFR, AADAC, CYP3A4, DIAPH1, FAM210A, FMO3, GBP2, ABCB4, NINJ1, CYP2C8, FES, KMO, CYP2C19, BCL2L10, AQP9, BRI3, UGCG, CDHR2, ENPEP, ASGR1, ABCB11, CTSL, ASIC5, HSD11B1, EBP, ASGR2, CYP3A43, HSD3B7, INTS2, CYP2C9, IBTK, SLC16A6, LHFPL2, MFAP3L, SLC2A6, IGFLR1, ITGB4, DPY19L1, ABCC2, PSKH1, SLC10A1, NPC1L1,
   [0432] e. Tissue protected: Kidney (glomeruli) ZAP70, CORO7, KDR, MAPT, SYT13, TGFBR3, TNFSF12, SLC45A1, PODXL, KIRREL1, WHAMM, KSR2, RECK, PTPRG, MRGPRF, TPSG1, PECAM1, SCUBE1, PLA2R1, PTH2R, PNPLA3, PRKAR2B, EHD2, MME, NPHS2, RMC1, TNS2, A RHGAP17, SNCA, PSD4, PHACTR2, NAPG, RYK, SLC35B1, TMEM171, CLSTN1, EHD1, HYAL2, EHD4, CD34, GLT8D2, EVI2A, ENG, CD99, FAM210A, CR1, GBP2, FADS3, ANKRD27, ANO8, AQP1, ENPEP, ARRB1, LIMS2, ITGA8, EHD3, NIPA2, LDLRAD2, PI4KA, PSKH1,
   [0433] f. Tissue protected: Kidney (tubules) VNN1, AXL, TRPM3, TREH, CACNB2, ABCD4, FCAMR, GABARAPL2, TM4SF18, UBE2J1, SELPLG, MAPT, PCSK5, SVEP1, SMIM24, SLC5A12, SLC5A2, SPCS1, TNFSF12, SLC12A1, NAAA, SLC27A2, SLC6A19, S1PR2, SLC34A3, NEGR1, PTH1R, WHAMM, PTPRD, DLC1, MPP6, KCNH8, LIN7A, MRGPRF, SLC34A1, PRICKLE1, SLCO4A1, KCNQ4, NAT8, PNPLA3, PALM, VEPH1, KIRREL3, CNEP1R1, SORD, GOLGA2, MPP5, MME, SLC25A15, OBSCN, AATK, UGT2B4, SLC22A6, TMEM72, UGT3A1, XPNPEP2, VSIG10, ATP6V0A4, SLC7A7, SERAC1, ZP2, VAC14, QTRT1, TMEM252, TSPAN13, TMEM174, TTC7B, ARHGAP17, SLC28A1, SLC22A2, GOPC, SPHK1, SCAMP5, SLC22A8, SLC13A3, SLC39A14, SLC6A12, SNX6, PHACTR2, RAB11FIP5, SLC6A18, SLC13A2, TMEM213, SYT7, RAB29, PEAR1, SLC4A4, NAPG, RYK, PKHD1, PRRT3, SLC35G2, OPRD1, NAPB, TMEM171, TSPAN16, TMEM39B, TMEM30A, CA2, ENPP6, GGT1, DPEP1, ENPP3, CUBN, CLSTN1, FCER1A, HYAL2, SLC44A2, ADCY7, FAM151A, GAS2, FKBP2, SLC2A2, CHDH, FAM126B, HTR1A, CREB3L2, GLT8D2, TM7SF2, GATM, CASR, FOLH1, GCHFR, FAM210A, CA12, DGKQ, GBP2, FES, KMO, LRFN4, L1CAM, MAGI1, AP3M1, ANKRD27, BSND, BCL2L10, ANO8, AQP6, AQP1, CDC42EP5, MPP1, UGCG, CDHR2, SH3BP5, ENPEP, SLC7A9, FXYD2, ACE, CMKLR1, COX7B, AKAP10, ANXA13, AP1S3, EPB41L3, CYP3A43, HSD3B7, CDH16, B3GAT1, INTS2, ABCC5, SMPD4, SLC43A2, SLC16A6, LHFPL2, NDUFS1, GFRA2, MCUB, GNG12, SLC2A6, KIAA2013, NIPA2, NIPAL1, FMO1, GAL3ST1, DPY19L1, LRP2, ALOX12, CHL1, PI4KA, OR10R2, GRIN2D, ABCC2, PSKH1, LRRK2,
   [0434] g. Tissue protected: Heart (cardiomyocytes) TCTN2, SLC30A4, CAP2, CD36, GABARAPL2, MGAT4C, RASL10B, PCSK5, SLC25A17, PI4KB, TNFSF12, TLN2, SGCB, NEGR1, BVES, P2RX6, POPDC2, P2RY6, PLN, SGCG, SLCO4A1, SRL, KCNQ4, LANCL2, PLPP7, VEPH1, CNEP1R1, DMPK, GOLGA2, SLC25A15, OBSCN, AATK, SIPA1, SERAC1, YRDC, ZP2, VAC14, TBC1D3, ARHGAP17, SLC25A25, C2orf88, RAB11FIP4, SLC39A14, SLC6A12, SLCO2B1, RAB29, TEX261, TMEM171, TMEM39B, TMEM30A, CNTN3, CKMT2, DSP, ADCY7, CACNA2D1, CDH15, FNDC5, GNB5, FAM126B, HTR1A, CAVIN4, SLC2A4, GLT8D2, HHATL, FLNC, CHRNA1, CD248, GPAT2, DGKQ, GBP2, CAMK2B, LRRC37B, FES, LEPROTL1, AP3M1, ABHD16A, ANKRD27, DMD, CDHR2, CNTNAP3, CSF3R, CPT1B, COX7B, CDH13, AKAP6, ADGRG6, ADRB1, AP1S3, CNPPD1, ABCC5, SMPD4, SLC16A6, MYZAP, MFAP3L, NCAM1, GPR182, NDUFS1, GPR15, MLIP, IGFLR1, ITGB4, LDLRAD2, DPY19L1, PI4KA, OR10R2, PRKCA, DES, PSKH1,
   [0435] h. Tissue protected: Thyroid SLC30A4, TMEM100, VPS33B, TGFBR3, TNFSF12, SCNN1D, NUS1, TVP23B, LANCL2, PSD3, VEPH1, CNEP1R1, SORD, GOLGA2, OBSCN, AATK, SERAC1, TVP23C, TSPAN13, TBC1D3, TBCD, ZC4H2, ARHGAP17, GOPC, RNFT2, NAPG, RYK, TMEM39B, TMEM30A, IYD, DUOX1, CLSTN1, FYN, FKBP2, FAM126B, GLT8D2, CD99, DIAPH1, HCN1, MALL, FES, MAGI1, AP3M1, ANKRD27, AAK1, ARRB1, ARRDC1, AKAP10, AP1S3, CDH16, IBTK, MTNR1B, LHFPL2, NCAM1, GFRA2, GNG12, NIPA2, IGFLR1, FAM234B, OR10R2, GRIN2D, PSKH1,
   [0436] i. Tissue protected: Pancreatic endocrine cells (Islets) CACNB2, SCGN, PLSCR4, SLC25A17, TGFBR3, PI4KB, SVEP1, STX1A, NAAA, SCG3, TVP23B, MPP6, PTGDR2, RAB3B, KCNQ4, PTPRN, PTH2R, VEPH1, GOLGA2, OBSCN, AATK, NECAB2, SLC17A6, SHISAL2B, SERAC1, YRDC, TVP23C, VAC14, TSPAN7, TSPAN13, TBC1D3, SLC30A8, SLC25A25, PTPRN2, PHACTR2, NAPG, TEX261, SLC35G2, NAPB, DGCR2, FAM169A, CASR, CD99, DIAPH1, CD82, GBP2, UGCG, ELMO2, CLU, FXYD2, CADPS, ARRDC1, ASIC5, EPB41L3, GAD2, ALOX5, IGFLR1, LDLRAD2, PI4KA, OR10R2, PSKH1,
   [0437] j. Tissue protected: Pancreatic exocrine cells GABARAPL2, RASL10B, UBE2J1, SELPLG, PCSK5, PLSCR4, PI4KB, SVEP1, SPCS1, STIMATE, NAAA, TMEM97, PLEKHA3, TVP23B, MED28, MPP6, PTH2R, NEURL1, VEPH1, GOLGA2, OBSCN, AATK, SPRED1, VSIG10, SERAC1, YRDC, TVP23C, VAC14, TSPAN13, TBC1D3, ZC4H2, GOPC, SPHK1, SYCN, SLC39A14, PHACTR2, SLCO2B1, RAB29, SLC4A4, NAPG, RYK, PKHD1, CA2, DPEP1, CUZD1, KIRREL2, ADCY7, FKBP2, GLT8D2, EVI2A, GATM, AQP8, DIAPH1, FAM210A, GPAT2, CA12, DGKQ, GBP2, FES, MAGI1, LEPROTL1, AP3M1, AQP1, CDC42EP1, ELOVL7, ACE2, CFTR, FXYD2, ARRB1, ARRDC1, AKAP10, PIK3AP1, AQP12A, AQP12B, IBTK, SMPD4, MCUB, SLC2A6, NIPA2, FAM234B, OR10R2, PSKH1,
[0438] 3. Cancer treated: renal cancer
   [0439] a. Tissue protected: Colon TJAP1, UGT2A3, TMEM138, TMEM237, SLC7A6, ATP8B2, SLC46A1, ST3GAL6, PCSK5, LPCAT2, SMIM24, SLC6A6, SEC13, SLC41A2, SOCS7, PEX1, PEMT, QRFPR, RPH3AL, NPDC1, NTRK1, GOLGA8B, GRIK2, RAC1, PCDHGA10, HRAS, PILRA, RAC3, PKHD1L1, USP8, YIF1B, WHAMM, PLCB3, RHBDL2, SLC25A20, PSTPIP2, RAB3B, PLA2G2A, KRAS, TMEM45A, STXBP6, NRAS, STYK1, SLC9A3, IFI27, ITLN1, TENM3, STXBP3, TAOK2, MITD1, MUC15, PRSS8, PEX10, GNPNAT1, OSBPL7, CD46, LRRC55, PROM2, NUTF2, PALM, PLPP7, KCNQ1, NECTIN1, OBSCN, NALCN, SLC51B, SLC26A3, SLC43A3, SELENOT, SLC9A1, ST7, SNTA1, UGT2B17, VSIG10, TMEM236, TUB, TEX264, VPS35L, UGT2B28, ZNRF1, TMEM69, TMEM253, TMEM41A, TSPAN8, ZFYVE9, UGT2B15, SLC35A3, GOPC, PCDH1, RNF125, QPCTL, SLC28A3, SLC45A4, RAB27A, SYP, SLC12A6, PARD3B, PIGZ, PTPRN2, SNX6, SMIM6, PHACTR2, MIA3, STK17B, SIGLEC14, SSTR1, TMEM204, SNX18, PIK3R5, RHOU, SLC4A5, MSMO1, NAPB, RNF186, TRAF3IP3, TMIGD2, TYRO3, TAS2R38, CA2, PRKCZ, ACVR1B, DPEP1, EMC9, FAM83B, GSDMB, GPBAR1, FKRP, FMO5, EMC6, SYK, KCTD3, GOLPH3, ATP2C2, ABCG2, CD177, CLCA1, GLP2R, CEACAM1, EPHB3, ADGRF1, FAM126B, DGKE, CYP4F11, GBF1, DMTN, GOLGA8A, AQP8, CEACAM5, WDPCP, CNR1, ARFGEF3, CARMIL2, CA4, CHMP5, KPNA2, GNG11, GPR82, IGSF11, IL17RC, LRRC37B, EVA1B, MAGI1, FPGS, LPP, MAN1C1, EPHA10, FER1L6, BEST2, BRI3, GAL3ST2, FERMT1, ABCA10, CNTNAP3, CDH17, DTX3L, CYB561, AVEN, CXADR, GRAMD1A, CIB1, DCXR, ARL4C, ABHD12, EBP, B3GNT7, ALG14, CHMP2B, ALDH3A2, IBTK, SMPD4, SLC9A3R2, NISCH, SLC16A6, KCNN3, GIPC1, FUT3, GFRA2, GLUL, IL17RE, MCUB, MARCKSL1, EFHD2, FUT6, GPER1, HCN3, MBTPS1, JAML, NIPAL1, IL17RA, ITGB4, GPA33, GPC1, RPS6KC1, LZTR1, MUC13, NEU4, OR10R2, MUC4, NAPEPLD, IL4R,
   [0440] b. Tissue protected: Lung SLC30A4, ST3GAL6, TRIM13, LPCAT2, WHAMM, PTPRG, STX5, CD46, PALM, KCNQ1, EHD2, NECTIN1, RNF125, PSD4, TM4SF1, STEAP1, S100A9, PHLPP2, RHOU, EHD1, GPBAR1, ARHGEF1, CCR7, SLC44A2, GPC5, DCBLD1, AIFM2, CLIC2, CYB561D1, DTX3L, CYB561, CACNA2D2, ACE, IBTK, LAMP3, EFHD2, EHD3, GPER1, NSMF,
   [0441] c. Tissue protected: Skin TMEM243, TJAP1, TMEM138, TMEM237, CLEC10A, PERP, RXFP1, SLC5A6, SLC6A6, SLC41A2, GRIK2, RAC1, RAC3, TMEM40, MTMR2, REEP2, TMEM134, SLC10A6, OLFM2, PROM2, PALM, LYPD3, KRT1, PLA2G4E, SLC8A1, OBSCN, SLC43A3, TRPM2, SLC9A1, SNTA1, SRC, TUB, ZP2, ZNRF1, TMEM69, THBD, TACSTD2, SLC35A3, GOPC, RNF125, TMTC4, QPCTL, PARD3B, SNX18, LY6D, S100A9, MSMO1, TRAF3IP3, EMC9, FAM83B, GJB4, SYK, FA2H, DSP, CD177, ANO7, FRS3, EPHB3, FAM126B, EPHA4, DMTN, CD99, CAPNS2, ARFGEF3, KPNA2, DSC3, GSDMA, FGFBP1, EVA1B, LPP, FADS3, EPHA10, B3GNT4, DSG1, FERMT1, ABCA10, CDH5, AVEN, CXADR, ASPRV1, CIB1, ORAI1, DSG3, DCXR, CNPPD1, ALDH3A2, NISCH, MARCKSL1, FGFR3, GPER1, TACR1, GPC1, RPS6KC1, OR10R2, TMEM243, MS4A8, MGAT4C, TYR, SEC13, NTRK1, GOLGA8B, PKHD1L1, TMEM45A, IFI27, STXBP3, ICAM3, LRRC55, PLPP7, KCNQ1, NECTIN1, PPL, ST7, DCT, SMIM6, PMEL, RHOU, TYRO3, KCTD3, ATP2C2, GPC5, GBF1, CYB561A3, FAT2, GOLGA8A, FAM210A, CARMIL2, MALL, FAM241B, IL17RC, CYB561D1, CLEC2A, GIPC1, ITGB4, ALOX12, ,
   [0442] d. Tissue protected: Liver TMEM138, TECR, TMCC1, CLEC10A, ST3GAL6, TRIM13, PCSK5, SLC25A40, SLCO1B3, SLCO1B1, SLC27A5, SERINC3, SLC25A20, RDH16, TMEM45A, STX5, TAOK2, GNPNAT1, CD46, LRRC55, KCNQ1, SLC8A1, SORD, RFTN1, TFR2, TUB, VPS35L, ZNRF1, TNS2, TMEM204, MSMO1, TM4SF4, SLC30A10, CA2, ACVR1B, FMO5, CYP2W1, CYP2D6, CD177, CACNA1A, FYN, GAS2, CYP4F3, CYP2A7, EPHX1, CYP4F11, CYP1A2, CYP3A4, FAM210A, CYP2A6, CYP4V2, KPNA2, NINJ1, CYP2C8, DHCR24, CYP2C19, AQP9, ATP5F1C, BRI3, CYP4F2, ASGR1, CDH5, ABCB11, CYP2A13, CYP2E1, CXADR, DCXR, EPB41L5, HSD11B1, EBP, ASGR2, CYP3A43, CHMP2B, ALDH3A2, KCNJ11, CYP2C9, IBTK, SLC16A6, LHFPL2, MFAP3L, GIPC1, GLUL, MTCH2, IGFLR1, ITGB4, ABCC2, NPC1L1,
   [0443] e. Tissue protected: Kidney (glomeruli) TMEM138, TECR, TMCC1, ZAP70, ST3GAL6, KDR, SLC45A1, PODXL, PDGFRB, TRPV6, YIF1B, WHAMM, KSR2, PTPRG, MRGPRF, TPSG1, STX5, PECAM1, SCUBE1, PLA2R1, CD46, PTH2R, MCAM, NEU3, KCNAB1, PROM2, NUTF2, MAP6, EHD2, NECTIN1, LDLRAD3, NPHS2, ST7, SMIM18, TNS2, SNCA, PSD4, SORT1, PARD3B, PHACTR2, SNX18, PTPRO, TYRO3, ZBED3, PRKCZ, EHD1, ATP2C2, DCBLD1, ADGRF1, CD34, EVI2A, DMTN, ENG, CD99, FAM210A, CR1, ARFGEF3, FAM241B, GPR82, GPRC5B, EVA1B, LPP, FADS3, CRB3, DTX3L, CXADR, EPB41L5, SLC9A3R2, LIMS2, GPR153, IL17RE, ITGA8, MARCKSL1, EFHD2, EHD3, GPER1, LZTR1, NFXL1, KIAA0040, NEU4,
   [0444] f. Tissue protected: Kidney (tubules) TMEM243, TJAP1, TRPM3, TMEM237, TMCC1, TREH, ST3GAL6, STRA6, UBE2J1, SELPLG, PCSK5, SMIM24, SLC6A6, SLC12A1, SLC25A40, SLC41A2, PEX1, PEMT, RPH3AL, SLC34A3, GRIK2, SERINC3, HRAS, PTH1R, PKHD1L1, RHBG, RGS16, USP8, VPS26B, YIF1B, WHAMM, PTPRD, PARVB, RHBDL2, SLC25A20, KRAS, LIN7A, MRGPRF, STXBP6, MGAT4B, SLC34A1, RASA4, STX5, PRICKLE1, NRAS, TENM3, MITD1, MUC15, GNPNAT1, OSBPL7, CD46, NEU3, OLFM2, LRRC55, PROM2, NUTF2, PALM, KCNQ1, SLC8A1, SORD, MPP5, NECTIN1, OBSCN, LDLRAD3, RFTN1, SLC9A1, UGT3A1, ST7, SNTA1, VSIG10, ATP6V0A4, SLC7A7, SRC, TMEM80, VPS35L, ZP2, ZNRF1, QTRT1, TMEM252, TMEM174, TTC7B, TSPAN8, ZFYVE9, SLC22A2, SLC52A3, GOPC, PCDH1, SLC28A3, SLC45A4, SCAMP5, SLC22A8, PARD3B, PIGZ, SNX6, SMIM6, PHACTR2, SLC6A18, SLC13A2, TMEM213, MIA3, STK17B, TMEM204, TMEM184A, SLC4A4, SNORC, SLC23A1, PIK3R5, PKHD1, RHOU, SLC35G2, SLC4A5, OPRD1, NAPB, TMEM242, TMIGD2, TYRO3, TSPAN16, CA2, ENPP6, DPEP1, EMC9, FKRP, EMC6, GSDMC, SYK, CPNE6, ATP2C2, SLC44A2, GJA5, GPC5, ADCY7, GAS2, EPHB3, FAM126B, TM7SF2, CASR, CYP4F11, FOLH1, GBF1, DMTN, FAM210A, CARMIL2, CHMP5, GNG11, GPR82, GPRC5B, IGSF11, LRFN4, SLC7A8, MAGI1, BSND, AQP6, ATP5F1C, CDC42EP5, MPP1, CYP4F2, FERMT1, CDH5, CLDN10, SLC25A31, ACE, COX7B, GRAMD1A, DCXR, ARL4C, ATP12A, CYP3A43, CHMP2B, ALDH3A2, ABCC5, SMPD4, NISCH, SLC16A6, LHFPL2, GIPC1, NDUFS1, GFRA2, IL17RE, MCUB, MTCH2, GPER1, MBTPS1, NIPAL1, FMO1, GPC1, LZTR1, ALOX12, NXPE2, OR10R2, NSMF, ABCC2, NAPEPLD,
   [0445] g. Tissue protected: Heart (cardiomyocytes) TJAP1, TCTN2, SLC30A4, TMEM138, TECR, TMCC1, SLC7A6, CD36, MGAT4C, RASL10B, ST3GAL6, SLC14A1, TMEM106B, PCSK5, SUSD3, SLC6A6, TLN2, PITPNM1, SLC41A2, PEMT, GRIK2, PKHD1L1, YIF1B, PARVB, POPDC2, P2RY6, SLC25A20, PLN, SGCG, SRL, MITD1, OLFM2, LRRC55, PLPP7, KCNQ1, SLC8A1, DMPK, NECTIN1, OBSCN, SLC43A3, SIPA1, RYR2, ST7, SNTA1, YRDC, TMEM143, TMEM119, ZP2, ZNRF1, TBC1D3, SLC25A25, SLC45A4, RAB11FIP4, SORT1, SLCO2B1, STK17B, TMEM204, PPM1L, TEX261, RHOU, MSMO1, CNTN3, EMC9, EMC6, CYP2W1, DSP, ADCY7, CDH15, DCBLD1, FNDC5, FAM126B, RASGRP2, CAVIN4, SLC2A4, DGKE, HHATL, FAM168B, GBF1, CHRNA1, CD248, WDPCP, GPAT2, ARFGEF3, CYP4V2, KPNA2, FAM241B, GPR82, CAMK2B, IGSF11, IL17RC, LRRC37B, EVA1B, ABHD16A, EPHA10, ATP5F1C, DMD, CDC42SE1, ATP1A3, CNTNAP3, DTX3L, CSF3R, ATP2A2, AVEN, CAV3, CPT1B, COX7B, CDH13, CIB1, ORAI1, AKAP6, ADGRG6, ARL4C, CNPPD1, ALDH3A2, ABCC5, SMPD4, NISCH, SLC16A6, MYZAP, MFAP3L, GIPC1, GPR182, NDUFS1, IL17RE, KIAA1109, MTCH2, GPER1, GPR15, HCN3, MBTPS1, MLIP, IGFLR1, ITGB4, NFXL1, OR10R2, NAPEPLD, DES,
   [0446] h. Tissue protected: Thyroid TJAP1, SLC30A4, TMEM237, TMCC1, TMEM100, TMEM106B, VPS33B, LPCAT2, SLC6A6, PEMT, QRFPR, NPDC1, NTRK1, GRIK2, MPP7, TPO, TRPV6, VPS26B, RHBDD2, STXBP6, IFI27, MUC15, OSBPL7, CD46, NEU3, OLFM2, PSD3, LRRC55, PROM2, NUTF2, KCNQ1, SLC8A1, SORD, NECTIN1, OBSCN, SLC43A3, SLC9A1, ST7, TUB, VPS35L, TBC1D3, TMEM41A, ZFYVE9, GOPC, RNF125, TMTC4, SLC45A4, SLC12A6, SORT1, SMIM6, MIA3, PPM1L, SNX18, PIK3R5, RHOU, TYRO3, IYD, DUOX1, EMC9, SYK, KCTD3, CYP2W1, FYN, EPHB3, FAM126B, EPHA4, DGKE, GBF1, CD99, CARMIL2, IPCEF1, KPNA2, MALL, GDAP1, IL17RC, EVA1B, MAGI1, CLIC2, FZD5, FERMT1, ABCA10, DTX3L, AVEN, CD300A, CXADR, DCXR, ALDH3A2, IBTK, NISCH, MTNR1B, LHFPL2, GIPC1, GFRA2, GLUL, IL17RE, KIAA1109, MARCKSL1, HCN3, MBTPS1, IGFLR1, IL17RA, OR10R2, NAPEPLD,
   [0447] i. Tissue protected: Pancreatic endocrine cells (Islets) STXBP1, STX1A, RTN1, NPDC1, NTRK1, SCG3, PTGDR2, RHBDL2, RAB3B, TAOK2, PTPRN, CD46, PTH2R, LRRC55, SLC8A1, OBSCN, NECAB2, SLC17A6, SV2A, YRDC, ZNRF1, TMEM69, TSPAN7, TBC1D3, ZFYVE9, SLC30A8, SLC25A25, SYP, SLC12A6, PTPRN2, PHACTR2, SIGLEC14, PPM1L, TEX261, SLC35G2, MSMO1, NAPB, DGCR2, CYP2W1, GNAO1, FAM169A, GCSAM, CASR, CD99, CD82, ARFGEF3, CHMP5, IL17RC, SLC7A8, DGKZ, FERMT1, CDH5, CYB561, ATP1A2, CADPS, AVEN, GAD2, KCNJ11, GIPC1, GPER1, IGFLR1, OR10R2, NAPEPLD,
   [0448] j. Tissue protected: Pancreatic exocrine cells TJAP1, TMEM237, RASL10B, UBE2J1, SELPLG, PCSK5, SLC6A6, STIMATE, SEC13, PEMT, RPH3AL, TMEM97, NTRK1, YIF1B, RHBDL2, SLC25A20, STX5, IFI27, TENM3, STXBP3, MITD1, MUC15, GNPNAT1, PTH2R, NEURL1, OLFM2, LRRC55, PROM2, NUTF2, KCNQ1, NECTIN1, OBSCN, SELENOT, ST7, SNTA1, VSIG10, YRDC, TMEM80, ZNRF1, TBC1D3, TSPAN8, GOPC, TMTC4, SYCN, SLC28A3, SLC12A6, PARD3B, PHACTR2, TM4SF1, MIA3, SLCO2B1, SSTR1, TMEM204, SLC4A4, PKHD1, RHOU, SELENOK, TAS2R38, CA2, PRKCZ, ACVR1B, DPEP1, EMC9, GP2, SYK, KCTD3, FA2H, GOLPH3, ADCY7, EVI2A, EPHX1, AQP8, ATP11B, FAM210A, WDPCP, GPAT2, ARFGEF3, CHMP5, CYP4V2, KPNA2, GPRC5B, MAGI1, CDC42EP1, KDELR3, FERMT1, CRB3, ABCA10, CFTR, CLDN10, CYB561, AVEN, CD300A, CXADR, ARL4C, B3GNT7, AQP12A, AQP12B, IBTK, SMPD4, GIPC1, IL17RE, KIAA1109, MCUB, MARCKSL1, EFHD2, GPER1, MBTPS1, IL17RA, MYOC, OR10R2,
[0449] 4. Cancer treated: urothelial cancer
   [0450] a. Tissue protected: Colon UGT2A3, TMEM60, SCGN, SLC47A1, PCSK5, SMIM24, SH3BP4, SLC19A3, PILRA, DLC1, RNF144B, RAB3B, SLCO4A1, STYK1, SLC9A3, IFI27, ITLN1, PTGDR, SYBU, STXBP3, MITD1, PEX10, OSBPL7, MYORG, MCOLN1, LRRN2, OBSCN, AATK, UGT2B17, VSIG10, TMEM236, UGT2B28, SLC16A14, TMEM253, UNC13B, UGT2B15, SLC35A3, RAB27A, RAB43, PTPRN2, SNX6, PIK3R5, NAPB, RNF186, TMEM219, TRAF3IP3, TMEM39B, CRK, CA2, PRKCZ, DPEP1, GSDMB, ADCY10, BMPR1A, CLCA1, GLP2R, FPR2, FKBP2, CHDH, ADGRF1, FAM126B, HTR1A, CA4, GNG11, KCNMA1, LRRC37B, EVA1B, MAGI1, BEST2, ABCG8, BCL2, GAL3ST2, HTR4, B3GNT8, ELOVL7, CDHR2, ANPEP, CNTNAP3, CDH17, GRAMD1A, ASIC5, ABHD12, C12orf66, ALG14, ALDH3A2, B3GAT1, IBTK, MCUB, NIPAL4, GPA33, RPS6KC1, LZTR1, MUC13, HPS6, NEU4, OR10R2,
   [0451] b. Tissue protected: Lung SLC30A4, ILK, TRIM13, SLC22A15, SLC25A17, IL10RB, RNF144B, PTPRG, SGIP1, MXRA7, EHD2, PRRG2, PSD4, RAB43, STEAP1, EHD1, CCR7, SLC44A2, AOC3, AIFM2, CLIC2, AQP4, CACNA2D2, ACE, CADM1, IBTK, LAMP3, EHD3, NSMF, LRRK2,
   [0452] c. Tissue protected: Skin CACNB2, CLEC10A, PERP, ENPP1, REEP2, F2R, MCOLN1, OBSCN, AATK, TRPM2, RMC1, SLC16A14, SLC35A3, TRAF3IP3, CRK, FA2H, FAM126B, ATRAID, EVA1B, B3GNT4, DSG1, ABCG8, ASPRV1, DSG3, ALDH3A2, RPS6KC1, OR10R2, MS4A8, CACNB2, MGAT4C, TYR, SH3BP4, IFI27, STXBP3, DCT, PMEL, ARHGAP21, TMEM219, CYB561A3, MALL, BCL2, BBS1, ,
   [0453] d. Tissue protected: Liver APLNR, CACNB2, CLEC10A, TRIM13, SYT13, PCSK5, RAB17, ENPP1, SLC27A2, SLCO1B3, SLCO1B1, SLC27A5, SLC19A3, PEX11G, RNF144B, KCNQ4, MYORG, MCOLN1, LRRN2, SLC25A15, AATK, UGT2B4, TFR2, TNS2, UNC13B, RAB43, TSPAN2, TM4SF4, CRK, CA2, CYP2W1, CYP2D6, BMPR1A, CACNA1A, FYN, GAS2, SLC2A2, HTR1A, AKR1A1, CYP2A7, CYP1A2, CYP3A4, CYP2A6, CYP2B6, FMO3, NINJ1, CYP2C8, FES, KMO, CYP2C19, BCL2L10, AQP9, ABCG8, AP1S2, CDHR2, ANPEP, ASGR1, CYP2A13, ASIC5, ACAD11, BBS1, ASPHD1, HSD11B1, ASGR2, CYP3A43, ALDH3A2, INTS2, CYP2C9, IBTK, MFAP3L, NIPAL4, IGFLR1, HPS6, ABCC2, DPP4, SLC10A1, NPC1L1,
   [0454] e. Tissue protected: Kidney (glomeruli) ZAP70, ILK, MAPT, SYT13, RAB17, SLC45A1, KIRREL1, KSR2, PTPRG, MRGPRF, TPSG1, PLA2R1, PTH2R, F2R, MAP6, EHD2, LDLRAD3, NPHS2, RMC1, S LC16A14, TNS2, PRRG2, SNCA, PSD4, PTPRO, SREBF1, VASN, PRKCZ, EHD1, AIF1L, ADGRF1, CD34, ENG, CR1, GPRC5B, EVA1B, AQP1, ABCG8, CRB3, ABCC1, LIMS2, ITGA8, EHD3, NIPAL4, LZTR1, HPS6, NEU4, DYSF, DPP4,
   [0455] f. Tissue protected: Kidney (tubules) VNN1, TRPM3, TREH, CACNB2, ILK, STRA6, UBE2J1, SLC47A1, SELPLG, MAPT, PCSK5, RAB17, ENPP1, SMIM24, SLC5A12, SLC5A2, SLC12A1, SLC27A2, S1PR2, SLC34A3, SLC19A3, MGAM, PEX11G, PTH1R, VPS26B, PARVB, DLC1, RNF144B, LIN7A, MRGPRF, TMEM132E, PRICKLE1, SLCO4A1, TMEM52B, KCNQ4, MITD1, OSBPL7, NAT8, MYORG, MCOLN1, KIRREL3, LRRN2, MPP5, SLC25A15, OBSCN, LDLRAD3, AATK, UGT2B4, ATP6V1D, SLC22A6, TMEM72, UGT3A1, VSIG10, ATP6V0A4, SLC7A7, UST, QTRT1, TMEM252, SLC16A14, TMEM174, UNC13B, SLC28A1, SLC22A2, SCAMP5, SLC22A8, SLC13A3, RUFY3, SNX6, SLC6A18, SLC13A2, TMEM213, SLC4A4, SREBF1, PIK3R5, PKHD1, ARHGAP21, SLC35G2, OPRD1, NAPB, TSPAN2, TMEM219, VASN, TMEM39B, CRK, CA2, GGT1, DPEP1, ENPP3, CUBN, SLC44A2, AIF1L, ADCY10, CDH6, FAM151A, AP4M1, GAS2, FKBP2, SLC2A2, CHDH, FAM126B, HTR1A, AKR1A1, TM7SF2, ATRAID, FOLH1, CLIC4, GNG11, KCNMA1, GPRC5B, FES, KMO, MAGI1, BCL2L10, AQP1, ABCG8, CDC42EP5, BCL2, MPP1, AP1S2, CDHR2, ANK2, ANPEP, SLC7A9, CLDN10, FXYD2, ACE, CLDN2, GRAMD1A, ANXA13, BBS1, ASPHD1, C12orf66, CYP3A43, CDH16, CADM1, ALDH3A2, B3GAT1, INTS2, NDUFS1, KCND1, MCUB, GAL3ST1, LRP2, LZTR1, HPS6, OR10R2, GRIN2D, NSMF, ABCC2, MDGA2, DYSF, DPP4, LRRK2,
   [0456] g. Tissue protected: Heart (cardiomyocytes) TCTN2, SLC30A4, UCP3, APLNR, CD36, ILK, MGAT4C, TMEM106B, SLC22A15, PCSK5, SLC25A17, RAB17, SLC19A3, BVES, P2RX6, PARVB, POPDC2, P2RY6, PLN, RNF144B, SGCG, SLCO4A1, SRL, KCNQ4, MITD1, MXRA7, LANCL2, MYORG, MCOLN1, SLC25A15, OBSCN, AATK, SIPA1, RYR2, YRDC, UST, TBC1D3, PRRG2, SLC25A25, RAB11FIP4, SLCO2B1, ST8SIA2, TEX261, SCN7A, ARHGAP21, TMEM219, VASN, TMEM39B, CKMT2, CYP2W1, BMPR1A, CDH6, CACNA2D1, CDH15, FAM126B, HTR1A, CAVIN4, HHATL, CHRNA1, GPAT2, CAMK2B, LRRC37B, EVA1B, FES, LEPROTL1, ABCG8, AP1S2, CDHR2, ANK2, CNTNAP3, CPT1B, CDH13, AKAP6, ADGRG6, ADRB1, ACAD11, BBS1, AP4E1, PAM, ALDH3A2, MYZAP, MFAP3L, NCAM1, GPR182, NDUFS1, KCND1, GPR15, NIPAL4, IGFLR1, OR10R2, DES, DYSF,
   [0457] h. Tissue protected: Thyroid SLC30A4, APLNR, ILK, TMEM100, TMEM106B, SLC22A15, RAB17, ENPP1, SCNN1D, SLC19A3, TPO, VPS26B, RHBDD2, IFI27, SYBU, MXRA7, OSBPL7, LANCL2, PSD3, MCOLN1, OBSCN, AATK, UST, SLC16A14, TBC1D3, UNC13B, PRRG2, RAB43, SLC26A4, SREBF1, PIK3R5, ARHGAP21, TMEM39B, CSK, IYD, CYP2W1, ADCY10, BMPR1A, CDH6, FYN, FKBP2, FAM126B, AKR1A1, IPCEF1, CYP4X1, MALL, KCNMA1, EVA1B, FES, MAGI1, CLIC2, ABCG8, BCL2, BBS1, AP4E1, CDH16, CADM1, ALDH3A2, IBTK, NCAM1, IGFLR1, HPS6, OR10R2, GRIN2D,
   [0458] i. Tissue protected: Pancreatic endocrine cells (Islets) STXBP1, CACNB2, SCGN, SLC25A17, STX1A, RTN1, SCG3, RAB3B, KCNQ4, MXRA7, PTPRN, PTH2R, MCOLN1, OBSCN, AATK, NECAB2, SLC17A6, ATP6V1D, SHISAL2B, SV2A, YRDC, TSPAN7, TBC1D3, SLC30A8, PRRG2, SLC25A25, PTPRN2, RUFY3, TEX261, SLC35G2, NAPB, DGCR2, CYP2W1, CDH6, GNAO1, FAM169A, ABCG8, FXYD2, ATP1A2, CADPS, ASIC5, BBS1, PAM, CADM1, GAD2, KCND1, IGFLR1, HPS6, OR10R2, MDGA2, DPP4,
   [0459] j. Tissue protected: Pancreatic exocrine cells UBE2J1, SELPLG, PCSK5, RAB17, ENPP1, SH3BP4, SLC19A3, RNF144B, IFI27, SYBU, STXBP3, MITD1, MXRA7, PTH2R, MCOLN1, LRRN2, OBSCN, AATK, VSIG10, YRDC, SLC16A14, TBC1D3, SYCN, SLCO2B1, SLC4A4, PKHD1, SCN7A, TMEM219, CRK, CSK, CA2, PRKCZ, DPEP1, CUZD1, GP2, KIRREL2, FA2H, ADCY10, BMPR1A, CDH6, AP4M1, FKBP2, AKR1A1, GPAT2, GPRC5B, FES, MAGI1, LEPROTL1, AQP1, ELOVL7, AP1S2, CRB3, ANPEP, CFTR, CLDN10, FXYD2, AP4E1, ASPHD1, PIK3AP1, CADM1, AQP12A, AQP12B, IBTK, MCUB, HPS6, OR10R2,
[0460] 5. Cancer treated: head and neck cancer
   [0461] a. Tissue protected: Colon AXL, ZDHHC2, SLC30A7, SFT2D2, UGT2A3, TMEM237, TMEM74B, TNFSF14, TTC17, ATP8B2, CORO7, ACY3, CHST11, FIBCD1, GABARAPL2, SLC46A1, SCGN, ST3GAL6, ZGRF1, SLC47A1, SNX24, SMIM24, SRI, SLC26A2, NAAA, SFXN5, SOCS7, PEX1, PEMT, NDUFS8, SLC19A3, PARD3, PLPP1, RHOH, PIGR, PLEKHA3, TPCN1, TULP3, TJP3, WSCD1, TCIRG1, WHAMM, DLC1, PIGU, RAP1GAP, PSTPIP2, RAB3B, MFSD10, SEL1L3, TMEM45A, SERP1, SCARA3, SLCO4A1, SPPL3, STYK1, MAPKAP1, SLC9A3, IFI27, ITLN1, PTGDR, NECAP1, PLIN2, PEX10, ABCC3, OSBPL7, CD46, PCDH11X, GPR183, LRRC55, SLC24A3, MACF1, MGST2, MGAT4A, LRRN2, CNEP1R1, DENND5B, OBSCN, AATK, MEGF8, PNKD, SLC26A3, SERP2, TNFAIP8L3, SELENOT, SLC3A1, UGT2B17, VSIG10, TMEM236, VPS28, VPS35L, UGT2B28, SYTL4, SYTL3, TMEM64, TMEM253, TSPAN31, TMEM41A, TSPAN8, TNFRSF14, SYTL2, TMEM201, UGT2B15, MCUR1, PCDH1, SLC28A3, PTAFR, RAB27A, SYP, SUSD6, PIGZ, PTPRN2, SLC39A14, SLC6A12, SLC6A15, RAB31, TRPM4, VTI1B, TNFRSF10A, TMEM164, STK38L, MTG2, PIK3R5, IMMT, NAPB, RNF186, TMEM219, TMEM171, TAS2R38, TMEM39B, ADCK2, ATG2B, CA2, CCR10, CDHR5, PRKCZ, DPEP1, GSDMB, FKRP, GPC4, CX3CR1, DPY19L4, SLC48A1, CLEC16A, FCER1G, GOLPH3, DMXL2, ABCG2, ACSLS, CLCA1, GLP2R, CEACAM1, FPR2, FAR2, CHDH, ADGRF1, HTR1A, CLN6, CTNND1, DMTN, FLNC, FXYD6, ARL8B, AQP8, ELOVL1, CA4, SLC37A4, DPP10, HRH1, GNG11, DGKQ, GPR82, KCNMA1, IGSF11, CTDNEP1, EVA1B, GJA4, GALNT16, MAGI1, FPGS, MAN1C1, AP3M1, FER1L6, ANO8, BEST2, BRI3, BCL2, HTR4, B3GNT8, ELOVL7, CDHR2, DENND5A, ACE2, ANPEP, CNTNAP3, CDH17, ALG2, ATP11C, CLDND1, CYP20A1, GRAMD1A, ASIC5, B3GNT6, TMEM30B, ABHD12, AGPS, EBP, B3GNT7, HSD3B7, ALG14, CASD1, CHMP2B, ABCD3, B3GAT1, HHLA2, IBTK, SMPD4, SLC9A3R2, MPZL1, NCEH1, NBAS, GIPC1, MC4R, GFRA2, GLUL, MCUB, SLC2A10, SLC2A6, KIAA2013, NIPAL1, NIPAL4, APOOL, IL17RA, GPA33, DPY19L1, HIGD1A, LZTR1, MUC13, HPS6, MT-ND4, MFSD2A, NEU4, OR10R2, MUC4, PDLIM4, IL4R, PSKH1,
   [0462] b. Tissue protected: Lung TGM2, AXL, SLC30A7, SLC30A4, CHST11, ST3GAL6, TRIM13, RNF144A, PIGS, AGER, WHAMM, RAP1GAP, PTPRG, MFSD10, CD46, GPR183, PSD4, SLC6A15, VTI1B, TMEM164, STEAP1, STK38L, EHD4, FCER1G, CYB5A, SLC44A2, ACSL5, AOC3, CTXN2, AIFM2, LPAR6, AP3M1, CLIC2, AIG1, ELMO2, AQP4, CACNA2D2, ACE, AP3S1, CD63, CYP20A1, AP3S2, CACNA1C, CADM1, ABCD3, CAVIN2, IBTK, NCEH1, LAMP3, MC4R, NSMF, SLC34A2, PSKH1, LRRK2,
   [0463] c. Tissue protected: Skin TMEM243, ZDHHC2, TMEM237, CLEC10A, ACER3, CHST11, PERP, RNF145, TULP3, REEP2, ITGA9, PLIN2, ABCC3, GPR183, MGST2, F2R, OBSCN, AATK, PNKD, RMC1, TMEM260, ZP2, SYTL3, UBR4, VTI1B, TMEM164, TMEM171, DMXL2, ARL8A, ANO7, TESC, EPHA4, ATRAID, CTNND1, DMTN, ARL8B, CD99, ELOVL1, CAPNS2, ANKRD13A, GSDMA, FGFBP1, EVA1B, GALNT16, AP3M1, FADS3, B3GNT4, ADGRF4, ASPRV1, DSG3, COL13A1, AGPS, CNPPD1, ABCD3, MPZL1, NBAS, APOOL, MFSD2A, OR10R2, PSKH1, TMEM243, MGAT4C, TYR, TCIRG1, RAP1GAP, SEL1L3, TMEM45A, IFI27, ICAM3, LRRC55, MERTK, VPS28, DCT, ZC4H2, MCUR1, PMEL, TMEM219, B3GNT5, GPX8, FAR2, CYB561A3, FAT2, FAM210A, SLC37A4, BCL2, BBS1, CLEC2A, HSD3B7, GIPC1, ALOX12, SLC2A11, ,
   [0464] d. Tissue protected: Liver TECR, TNFSF14, APLNR, CLEC10A, ST3GAL6, TRIM13, ALPL, NAAA, RNF144A, SLC25A40, SLCO1B3, SLCO1B1, SLC25A43, SLC27A5, SLC19A3, PIGS, RHOH, TPCN1, PIGU, PDZK1, RDH16, TMEM45A, SCARA3, SPPL3, MAPKAP1, CD46, GPR183, LRRC55, MGST2, MERTK, LRRN2, DENND5B, SORD, SLC25A15, AATK, MEGF8, UGT2B4, YIPF1, TFR2, TMEM260, VPS35L, ZDHHC8, UGT1A6, TMEM64, TNS2, TBCD, UBR4, TMEM201, TSC2, PTAFR, SLC39A14, SLC6A12, SERINC1, VTI1B, TMEM164, TSPAN2, TMEM171, CA2, FCER1A, GPC4, EVA1A, GHR, DPY19L4, SLC48A1, CLEC16A, CYP2W1, CYP2D6, CYB5A, ACSL5, B3GNT5, CACNA1A, FYN, GAS2, FAR2, SLC2A2, HTR1A, TESC, CYP2A7, CYP1A2, CTNND1, FXYD6, CYP3A4, FAM210A, CYP2A6, SLC37A4, FMO3, CYP4V2, ABCB4, NINJ1, CYP2C8, DHCR24, CDH2, CTDNEP1, KMO, GJA4, CYP2C19, AQP9, ABCA8, AIG1, BRI3, UGCG, AP1S2, CDHR2, ANPEP, ENPEP, ASGR1, SLC31A1, ABCB11, CYP2A13, CLDND1, CYP20A1, CYP2E1, CTSL, ASIC5, ACAD11, TMEM30B, BBS1, CMTM8, EPB41L5, HSD11B1, CYTH2, EBP, ASGR2, CYP3A43, HSD3B7, CHMP2B, ABCD3, INTS2, CYP2C9, IBTK, GRB14, MPZL1, NBAS, LHFPL2, MFAP3L, GIPC1, GLUL, MTCH2, GK, SLC2A6, NIPAL4, APOOL, DPY19L1, HIGD1A, HPS6, POMGNT1, ABCC2, PSKH1, SLC10A1, NPC1L1,
   [0465] e. Tissue protected: Kidney (glomeruli) SLC30A7, TECR, ZAP70, CORO7, ACER3, ST3GAL6, MAPT, SLC45A1, RNF144A, PLPP1, WHAMM, KSR2, RAP1GAP, PTPRG, MRGPRF, SCARA3, TPSG1, PECAM1, PLA2R1, CD46, PTH2R, KCNAB1, PNPLA3, MACF1, F2R, MAP6, NPHS2, RMC1, TNS2, PSD4, TNFRSF10A, PTPRO, SREBF1, SLC35B1, TMEM171, VASN, PRKCZ, HYAL2, CX3CR1, EHD4, AIF1L, ADGRF1, CD34, DMTN, ENG, CD99, FAM210A, CR1, GPR82, GPRC5B, EVA1B, GJA4, GALNT16, FADS3, ANO8, AQP1, CRB3, ENPEP, EPB41L5, CACNA1C, SLC9A3R2, MPZL1, LIMS2, ITGA8, NIPAL4, LZTR1, NFXL1, HPS6, MFSD2A, NEU4, DYSF, PSKH1,
   [0466] f. Tissue protected: Kidney (tubules) TMEM243, VNN1, AXL, ZDHHC2, SLC30A7, SFT2D2, TRPM3, TMEM237, TMEM74B, TREH, TNFSF14, TTC17, ACER3, ACY3, FIBCD1, FCAMR, GABARAPL2, ST3GAL6, UBE2J1, ZGRF1, SLC47A1, MAPT, ALPL, SMIM24, SLC5A12, SLC5A2, SLC12A1, NAAA, RNF144A, SLC25A40, SFXN5, PEX1, RDX, PEMT, SLC6A19, SLC22A11, S1PR2, NDUFS8, SLC34A3, SLC19A3, PARD3, ARHGAP5, NEGR1, PTH1R, PDGFC, PIGS, NOXA1, PIGR, TPCN1, VPS26B, WSCD1, TCIRG1, WHAMM, PTPRD, PARVB, DLC1, PIGU, RAP1GAP, PDZK1, LIN7A, MRGPRF, SEL1L3, UCHL1, SERP1, SCARA3, RASA4, SLCO4A1, SPPL3, ITGA9, MAPKAP1, NECAP1, ABCC3, OSBPL7, CD46, GPR183, LRRC55, NAT8, PNPLA3, SLC24A3, PLCD4, MACF1, MGST2, MGAT4A, MERTK, LRRN2, CNEP1R1, DENND5B, SORD, SLC25A15, OBSCN, AATK, MEGF8, PNKD, UGT2B4, ATP6V1D, SLC22A6, SERP2, TMEM72, TNFAIP8L3, UGT3A1, XPNPEP2, SLC3A1, VSIG10, VPS28, ATP6V0A4, SLC7A7, TMEM80, TMEM260, VPS35L, ZDHHC8, ZP2, VAC14, UGT1A6, TMEM252, TMEM174, TMEM64, UBR4, TSPAN31, TSPAN8, TNFRSF14, SYTL2, TMEM201, TMPRSS2, TSC2, SLC28A1, MCUR1, SLC22A2, PCDH1, SLC28A3, SCAMP5, PTAFR, SLC22A8, SLC13A3, PIGZ, SLC39A14, SLC6A12, RUFY3, RAB31, SLC6A18, SLC13A2, TMEM213, TRPM4, VTI1B, TNFRSF10A, TMEM164, TMEM184A, SLC4A4, SLC25A23, TMEM178B, SREBF1, PIK3R5, PKHD1, PRRT3, IMMT, SLC35G2, OPRD1, NAPB, TSPAN2, TMEM219, TMEM171, VASN, TSPAN16, TMEM39B, ADCK2, CA2, CDHR5, ENPP6, GGT1, JAM3, DPEP1, ENPP3, CUBN, FKRP, FCER1A, GPC4, EVA1A, GHR, HYAL2, GSDMC, CX3CR1, DPY19L4, SLC48A1, CLEC16A, CPNE6, CYB5A, SLC44A2, DMXL2, AIF1L, GJA5, ACSL5, CDH6, FAM151A, B3GNT5, GAS2, SLC2A2, CHDH, HTR1A, TESC, CLN6, TM7SF2, ATRAID, CASR, FOLH1, CTNND1, DMTN, FXYD6, ARL8B, CNTFR, CLIC4, FAM210A, ELOVL1, ANKRD13A, SLC37A4, HRH1, GNG11, DGKQ, GPR82, KCNMA1, GPRC5B, IGSF11, CDH2, CTDNEP1, KMO, LRFN4, GJA4, GALNT16, MAGI1, AP3M1, BSND, ANO8, AQP6, AQP1, CDC42EP5, BCL2, MPP1, UGCG, AP1S2, CDHR2, ANK2, DENND5A, ANPEP, ENPEP, SLC7A9, CLDN10, SLC31A1, ALG2, SLC25A31, FXYD2, ACE, CMKLR1, ACKR3, CLDND1, CLDN2, CYP20A1, GRAMD1A, TMEM63B, ANXA13, BBS1, EPB41L3, AGPS, CACNA1C, CYP3A43, HSD3B7, CDH16, CHMP2B, CADM1, ABCD3, B3GAT1, INTS2, ABCC5, SMPD4, MOXD1, HAS3, MPZL1, NBAS, LHFPL2, GIPC1, MC4R, GFRA2, KCNK5, MCUB, MTCH2, SLC2A10, GK, SLC2A6, KIAA2013, NIPAL1, APOOL, FMO1, GAL3ST1, DPY19L1, HIGD1A, LRP2, LZTR1, ALOX12, HPS6, MT-ND 4, CHL1, POMGNT1, SLC2A11, MFSD2A, OR10R2, GRIN2D, NSMF, ABCC2, PDLIM4, DYSF, PSKH1, LRRK2,
   [0467] g. Tissue protected: Heart (cardiomyocytes) TGM2, TCTN2, SLC30A7, SLC30A4, SLC27A6, TECR, TTC17, APLNR, CAP2, GABARAPL2, MGAT4C, RASL10B, ST3GAL6, SLC14A1, TMEM106B, SNX24, PITPNM1, RNF144A, SFXN5, SLC4A10, SGCB, PEMT, NDUFS8, NTRK3, RNF145, SLC19A3, NEGR1, BVES, TPCN1, TCIRG1, PARVB, POPDC2, P2RY6, PLN, RAP1GAP, MFSD10, SERP1, SCARA3, SGCG, SLCO4A1, SRL, MAPKAP1, GPR183, LRRC55, MACF1, MERTK, CNEP1R1, DENND5B, DMPK, SLC25A15, OBSCN, AATK, MEGF8, PNKD, SERP2, SIPA1, YRDC, TMEM143, ZP2, VAC14, TMEM64, UBR4, TSPAN31, PTPRB, TSC2, SLC25A25, RAB11FIP4, SUSD6, SLC39A14, SLC6A12, SERINC1, VTI1B, TNFRSF10A, TMEM164, SLCO2B1, STK38L, PPM1L, TMEM178B, ST8SIA2, IMMT, TMEM219, TMEM171, VASN, TMEM39B, ATG2B, CCR10, CNTN3, DPY19L4, CLEC16A, CKMT2, CYP2W1, DMXL2, CDH6, CDH15, FNDC5, GNB5, RASGRP2, HTR1A, CAVIN4, SLC2A4, HHATL, FLNC, FXYD6, CHRNA1, CNTFR, CD248, ELOVL1, GPAT2, SLC37A4, CYP4V2, DGKQ, GPR82, CAMK2B, IGSF11, CDH2, CTDNEP1, EVA1B, LEPROTL1, AP3M1, ABHD16A, AP1S2, CDC42SE1, CDHR2, ANK2, DENND5A, CNTNAP3, SLC31A1, CSF3R, ATP11C, CAV3, CPT1B, AKAP6, ADGRG6, ADRB1, ACAD11, BBS1, BCL2L13, CNPPD1, CACNA1C, PAM, ABCD3, ABCC5, SMPD4, GRB14, MPZL1, NCEH1, MYZAP, NBAS, MFAP3L, NCAM1, GIPC1, GPR182, MC4R, MTCH2, SLC2A10, GPR15, MLIP, NIPAL4, APOOL, SLC16A10, DPY19L1, HIGD1A, NFXL1, MT-ND4, POMGNT1, ICA1, OR10R2, DES, DYSF, GPR63, PSKH1,
   [0468] h. Tissue protected: Thyroid SLC30A7, SLC30A4, SFT2D2, TMEM237, TMEM74B, TNFSF14, APLNR, FIBCD1, TMEM100, TMEM106B, VPS33B, RNF144A, AHCYL1, SFXN5, SCNN1D, PEMT, NTRK3, RNF145, SLC19A3, TPO, TPCN1, TULP3, TJP3, VPS26B, TCIRG1, RHBDD2, LMAN2, PIGU, RAP1GAP, SEL1L3, SERP1, SCARA3, MAPKAP1, IFI27, OSBPL7, CD46, GPR183, PSD3, LRRC55, SLC24A3, MACF1, MGAT4A, CNEP1R1, DENND5B, SORD, OBSCN, AATK, PNKD, SERP2, VPS28, TMEM260, VPS35L, SYTL4, SYTL3, TBCD, UBR4, TMEM41A, ZC4H2, TSC2, PTAFR, SLC26A4, RAB31, VTI1B, TMEM164, RNFT2, STK38L, PPM1L, SLC25A23, SREBF1, PIK3R5, IMMT, TMEM39B, IYD, DUOX1, GPC4, GHR, DPY19L4, CLEC16A, FCER1G, CYP2W1, ARL8A, CDH6, B3GNT5, FYN, FAR2, CLN6, EPHA4, CTNND1, FXYD6, ARL8B, CD99, ANKRD13A, IPCEF1, KCNMA1, LPAR6, CTDNEP1, EVA1B, GJA4, GALNT16, MAGI1, AP3M1, CLIC2, BCL2, AAK1, ALG2, ACKR3, CD63, CD300A, CYP20A1, ARRDC1, BBS1, CMTM8, AGPS, CDH16, CADM1, ABCD3, CAVIN2, IBTK, MPZL1, NBAS, LHFPL2, LRP1B, NCAM1, GIPC1, MC4R, GFRA2, GLUL, GK, IL17RA, HPS6, POMGNT1, ICA1, MFSD2A, OR10R2, GRIN2D, PDLIM4, PSKH1,
   [0469] i. Tissue protected: Pancreatic endocrine cells (Islets) ZDHHC2, TTC17, SCGN, STX1A, NAAA, RNF144A, RTN1, SCG3, PARD3, PTGDR2, RAP1GAP, RAB3B, UCHL1, SERP1, PTPRN, CD46, PTH2R, GPR183, LRRC55, MGST2, MGAT4A, OBSCN, AATK, NECAB2, PNKD, SLC17A6, ATP6V1D, SHISAL2B, SV2A, YRDC, ZDHHC8, VAC14, TSPAN7, TMEM64, UBR4, SLC30A8, SLC25A25, SYP, PTPRN2, RUFY3, RAB31, VTI1B, PPM1L, IMMT, SLC35G2, NAPB, ATG2B, GPC4, DGCR2, CYP2W1, DMXL2, CDH6, CLCN5, B3GNT5, FAR2, GNAO1, TESC, FAM169A, CASR, CD99, CNTFR, CDH2, CTDNEP1, UGCG, ENO2, ELMO2, ATP9A, CLU, ALG2, FXYD2, ATP1A2, CLDND1, CYP20A1, ARRDC1, ASIC5, BBS1, EPB41L3, PAM, CADM1, GAD2, ABCD3, ALOX5, NBAS, GIPC1, MC4R, APOOL, HPS6, MT-ND4, OR10R2, PDLIM4, PSKH1,
   [0470] j. Tissue protected: Pancreatic exocrine cells ZDHHC2, TMEM237, TNFSF14, CHRM3, GABARAPL2, RASL10B, UBE2J1, ZGRF1, STIMATE, NAAA, AHCYL1, SFXN5, SLC4A10, PEMT, TMEM97, SLC19A3, PARD3, PIGS, NOXA1, PLEKHA3, TJP3, TCIRG1, RAP1GAP, MFSD10, SEL1L3, SCARA3, IFI27, ABCC3, PTH2R, LRRC55, SLC24A3, MGST2, MGAT4A, MERTK, LRRN2, OBSCN, AATK, MEGF8, PNKD, SELENOT, SLC3A1, VSIG10, YRDC, TMEM80, ZDHHC8, VAC14, SYTL4, TMEM128, TSPAN31, TSPAN8, PTPRB, SYTL2, TMPRSS2, ZC4H2, SYCN, SLC28A3, SUSD6, SLC39A14, SERINC1, VTI1B, SLCO2B1, MTG2, SLC4A4, PKHD1, IMMT, TMEM219, TAS2R38, CA2, PRKCZ, DPEP1, CUZD1, GPC4, GP2, KIRREL2, DPY19L4, CLEC16A, FCER1G, GOLPH3, DMXL2, CDH6, B3GNT5, FAR2, TESC, CLN6, CTNND1, ARL8B, AQP8, CNTFR, FAM210A, GPAT2, CYP4V2, DGKQ, GPRC5B, LPAR6, CTDNEP1, MAGI1, LEPROTL1, AP3M1, AQP1, KDELR3, ELOVL7, AP1S2, CRB3, ACE2, ANPEP, CFTR, CLDN10, ALG2, FXYD2, ACKR3, CLDND1, CD300A, CYP20A1, ARRDC1, COL13A1, CMTM8, PIK3AP1, B3GNT7, CADM1, ABCD3, ARFGAP3, AQP12A, AQP12B, IBTK, SMPD4, MOXD1, GRB14, MPZL1, NBAS, GIPC1, MC4R, MCUB, SLC2A10, SLC2A6, APOOL, SLC16A10, IL17RA, HPS6, MYOC, MT-ND4, POMGNT1, SLC2A11, OR10R2, SLC16A7, PDLIM4, PSKH1,
[0471] 6. Cancer treated: colorectal cancer
   [0472] a. Tissue protected: Colon TMEM138, SCGN, ST3GAL6, TMEM263, SOCS7, SEMA5A, SLC26A1, WHAMM, RAB27B, DLC1, RAB3B, ADIPOR2, MAPKAP1, ITLN1, TAOK2, LRRC55, OBSCN, SLC26A3, TUB, TMEM253, SYP, SLC39A2, SLC6A12, TMEM171, CA2, EFHD1, FKRP, ABCG1, ABCG2, CD177, GLP2R, GATM, ADGRA3, IGSF11, LRRC37B, ANKFY1, ANPEP, CNTNAP3, BIK, DCXR, CASD1, B3GAT1, SLC9A3R2, KCNN3, GFRA2, LZTR1, OR10R2,
   [0473] b. Tissue protected: Lung SLC30A4, ST3GAL6, TRIM13, VIPR2, SLC22A15, SLC25A17, RNF144A, AGER, TMEM43, WHAMM, RECK, PTPRG, EHD2, PRRG2, PSD4, STEAP1, EHD1, EHD4, CCR7, CYB5A, CAVIN1, GPC5, AOC3, CDH11, DCBLD1, CLIC2, AIG1, FCAR, ELMO2, CAV1, AQP4, CYB561D1, CACNA2D2, ACE, ANXA1, CAVIN2, LAMP3, EHD3, SLC34A2, LRRK2,
   [0474] c. Tissue protected: Skin TMEM243, TMEM138, CLEC10A, ACER3, VIPR2, TGFBR3, TMEM263, ENPP1, SEMA5A, TMEM43, MTMR2, REEP2, LYPD3, KRT1, F2R, PLA2G4E, OBSCN, RMC1, TUB, ZP2, THBD, TMEM171, CLCA2, GJB4, FA2H, CAVIN1, CD177, ANO7, EPHA4, GATM, ATRAID, ADGRA3, CD99, GJA1, CAPNS2, GSDMA, B3GNT4, DSG1, ADGRF4, CAV1, ANXA1, ASPRV1, DSG3, DCXR, CNPPD1, TACR1, OR10R2, TMEM243, TYR, SLC26A1, ADIPOR2, LRRC55, DCT, RHCG, RYK, PMEL, GPC5, B3GNT5, GPX8, CYB561A3, FAT2, FAM210A, BST1, CYB561D1, ALOX12, SLC2A11, ,
   [0475] d. Tissue protected: Liver TMEM138, CLEC10A, ST3GAL6, TRIM13, SYT13, ALPL, ENPP1, RNF144A, SLC25A40, SLC27A2, SLCO1B3, SLCO1B1, SLC27A5, RDH16, KCNQ4, MAPKAP1, TAOK2, LRRC55, SLC25A15, UGT2B4, YIPF1, TFR2, TUB, TNS2, SLC39A2, SLC6A12, TSPAN2, TMEM171, CA2, EVA1A, CYP2D6, CYB5A, ABCG1, CD177, B3GNT5, CACNA1A, GAS2, SLC2A2, CYP2A7, GATM, EPHX1, CYP1A2, CYP3A4, FAM210A, CYP2A6, CYP2B6, FMO3, NINJ1, CYP2C8, CDH2, FES, KMO, CYP2C19, BCL2L10, AQP9, ABCA8, AIG1, ANKFY1, ANPEP, ASGR1, ABCB11, CYP2A13, CTSL, DCXR, CMTM8, ASGR2, CYP2C9, MFAP3L, GK, IGFLR1, GAA, NPC1L1,
   [0476] e. Tissue protected: Kidney (glomeruli) TMEM138, ZDHHC6, ACER3, ST3GAL6, VIPR2, KDR, MAPT, SYT13, TGFBR3, SLC45A1, RNF144A, PODXL, KIRREL1, WHAMM, ITGB1, KSR2, RECK, PTPRG, MRGPRF, PECAM1, SCUBE1, PLA2R1, PTH2R, F2R, EHD2, NPHS2, RMC1, TNS2, PRRG2, SNCA, PSD4, RYK, PTPRO, SLC35B1, TMEM171, EHD1, EHD4, AIF1L, CAVIN1, DCBLD1, CD34, ENG, CD99, GJA1, FAM210A, CR1, GPRC5B, CAV1, BIK, ANXA1, COL6A2, SLC9A3R2, LIMS2, ITGA8, EHD3, LZTR1, KIAA0040, DYSF,
   [0477] f. Tissue protected: Kidney (tubules) TMEM243, TRPM3, ZDHHC6, TREH, ACER3, ST3GAL6, UBE2J1, SELPLG, MAPT, ALPL, TMEM263, ENPP1, SLC5A12, SLC5A2, SLC12A1, RNF144A, SLC25A40, SLC27A2, SLC6A19, S1PR2, SLC34A3, SEMA5A, SLC26A1, NEGR1, PTH1R, RHBG, WHAMM, PTPRD, RAB27B, DLC1, KCNH8, KCNJ1, LIN7A, MRGPRF, UCHL1, UPK3BL2, TMEM132E, KCNQ4, MAPKAP1, LRRC55, NAT8, KIRREL3, SLC25A15, OBSCN, UGT2B4, ATP6V1D, SLC22A6, TMEM72, UGT3A1, ATP6V0A4, SLC7A7, TMEM80, ZP2, QTRT1, TMEM252, TMEM174, RHCG, TMEM255B, UPK3BL1, SLC28A1, SLC22A2, SCAMP5, SLC22A8, SLC39A2, SLC6A12, RUFY3, SLC6A18, SLC13A2, TMEM213, SLC4A4, SLC23A1, RYK, SLC35G2, OPRD1, TSPAN2, TMEM171, TSPAN16, CA2, ENPP6, EFHD1, CUBN, FKRP, EVA1A, GSDMC, CPNE6, CYB5A, ABCG1, AIF1L, GJA5, GPC5, CDH6, FAM151A, B3GNT5, GAS2, SLC2A2, ABHD17C, CALCR, CREB3L2, GATM, ATRAID, CASR, FOLH1, CLIC4, GJA1, FAM210A, GPRC5B, IGSF11, CDH2, FES, KMO, LRFN4, BSND, BCL2L10, CDC42EP5, ANKFY1, SH3BP5, ANPEP, CLDN10, FXYD2, ACE, COX7B, TMEM63B, DCXR, EPB41L3, ATP12A, CDH16, B3GAT1, NDUFS1, GFRA2, KCNK5, GK, FMO1, LRP2, LZTR1, ALOX12, CHL1, NXPE2, SLC2A11, OR10R2, MDGA2, DYSF, LRRK2,
   [0478] g. Tissue protected: Heart (cardiomyocytes) TCTN2, SLC30A4, SLC27A6, TMEM138, UCP3, CAP2, CD36, RASL10B, ST3GAL6, VIPR2, SLC22A15, TRPV4, SLC25A17, PITPNM1, RNF144A, SGCB, NEGR1, BVES, TMEM43, P2RY6, PLN, ADIPOR2, SGCG, SRL, KCNQ4, MAPKAP1, LANCL2, LRRC55, DMPK, SLC25A15, OBSCN, YRDC, ZP2, PTPRB, PRRG2, SLC6A12, SLCO2B1, TEX261, TMEM171, CDH6, CDH15, DCBLD1, FNDC5, HHATL, FAM168B, CHRNA1, ADGRA3, CD248, GJA1, GPAT2, IGSF11, LRRC37B, CDH2, FES, LEPROTL1, ANKFY1, DMD, CDC42SE1, CNTNAP3, CAV1, BIK, CPT1B, COX7B, CDH13, ADRB1, CNPPD1, MYZAP, MFAP3L, NCAM1, NDUFS1, GPR15, IGFLR1, OR10R2, DES, DYSF,
   [0479] h. Tissue protected: Thyroid SLC30A4, ZDHHC6, TMEM100, VIPR2, VPS33B, SLC22A15, TRPV4, TGFBR3, TMEM263, ENPP1, RNF144A, NUS1, TPO, TMEM43, ADIPOR2, MAPKAP1, LANCL2, LRRC55, OBSCN, TUB, PRRG2, SLC39A2, RYK, IYD, DUOX1, ABCG1, CAVIN1, CDH6, B3GNT5, EPHA4, CD99, GJA1, IPCEF1, FES, CLIC2, AAK1, CAV1, BIK, ARRDC1, DCXR, CMTM8, CDH16, CAVIN2, MTNR1B, NCAM1, GFRA2, GK, IGFLR1, OR10R2, GAA,
   [0480] i. Tissue protected: Pancreatic endocrine cells (Islets) SCGN, TRPV4, SLC25A17, TGFBR3, STX1A, RNF144A, RTN1, SCG3, PTGDR2, RAB3B, UCHL1, KCNQ4, TAOK2, PTPRN, PTH2R, LRRC55, OBSCN, NECAB2, SLC17A6, ATP6V1D, SV2A, YRDC, TSPAN7, SLC30A8, PRRG2, TMEM255B, SYP, SLC39A2, RUFY3, TEX261, SLC35G2, DGCR2, CDH6, B3GNT5, GNAO1, FAM169A, CASR, CD99, CD82, CDH2, DGKZ, ELMO2, FXYD2, CADPS, ARRDC1, CFC1, EPB41L3, GAD2, IGFLR1, OR10R2, MDGA2, GAA,
   [0481] j. Tissue protected: Pancreatic exocrine cells CHRM3, RASL10B, UBE2J1, SELPLG, TMEM263, ENPP1, TMEM97, RAB27B, ADIPOR2, UPK3BL2, PTH2R, LRRC55, OBSCN, YRDC, TMEM80, TMEM128, PTPRB, TMEM255B, SYCN, SLC39A2, SLCO2B1, SLC4A4, RYK, CA2, CUZD1, KIRREL2, FA2H, CDH6, B3GNT5, GATM, EPHX1, FAM210A, GPAT2, GPRC5B, FES, L EPROTL1, ANPEP, CLDN10, FXYD2, BIK, ARRDC1, CMTM8, PIK3AP1, ARFGAP3, AQP12A, AQP12B, SLC2A11, OR10R2, GAA,
[0482] 7. Cancer treated: liver cancer
   [0483] a. Tissue protected: Colon ZDHHC2, SCGN, SLC26A2, GOLGA8B, PILRA, WHAMM, DLC1, PLCB3, RNF215, PSTPIP2, RAB3B, ITLN1, PTGDR, OSBPL7, LRRC55, PLPP7, MAST2, OBSCN, SLC3A1, VSIG10, VSTM5, TMEM69, TMEM41A, UNC13B, ARHGAP17, RAB27A, SYP, PTPRN2, SNX6, TRAF3IP3, VTCN1, ATG2B, C2CD2L, DPEP1, GPBAR1, PHKA1, CLCA1, FAM126B, GOLGA8A, CARMIL2, EPCAM, FER1L6, BEST2, GAL3ST2, B3GNT6, ABHD12, C12orf66, ALG14, CASD1, B3GAT1, IBTK, IFFO1, MC4R, MARCKS, MCUB, GNG12, LZTR1, MUC13, NEU4, OR10R2, NDST2,
   [0484] b. Tissue protected: Lung SLC30A4, TRIM13, SLC22A15, SLC6A14, WHAMM, PTPRG, STX5, MXRA7, EHD2, PSD4, RNF103, STEAP1, PHLPP2, EHD1, GPBAR1, EHD4, CCR7, GPC5, CLIC2, AQP4, ACE, AQP3, CACNA1C, IBTK, LAMP3, MC4R, MARCKS, EHD3, NSMF,
   [0485] c. Tissue protected: Skin TMEM243, ZDHHC2, ACER3, PERP, RXFP1, TGFBR3, SLC5A6, RNF145, MTMR2, REEP2, SLC10A6, LYPD3, PLA2G4E, SLC8A1, OBSCN, RMC1, ZP2, TMEM69, TRAF3IP3, C2CD2L, CLCA2, IGSF8, FA2H, PHKA1, DSP, ANO7, FAM126B, CAPNS2, ANKRD13A, GSDMA, B3GNT4, DSG1, ASPRV1, DSG3, AQP3, CNPPD1, MARCKS, TACR1, OR10R2, TMEM243, MS4A8, MGAT4C, SLC6A14, TYR, SLC25A33, GOLGA8B, LRRC55, PLPP7, XKR9, DCT, S100A8, PMEL, GPC5, GPX8, FAT2, GOLGA8A, CARMIL2, HCN1, CLEC2A, ,
   [0486] d. Tissue protected: Liver TRIM13, SLC25A40, SLCO1B3, SLCO1B1, SLC25A33, STX5, LRRC55, SLC8A1, UNC13B, FYN, NINJ1, IBTK,
   [0487] e. Tissue protected: Kidney (glomeruli) ZDHHC6, ACER3, KDR, TGFBR3, SLC45A1, PODXL, TRPV6, WHAMM, RNF215, PTPRG, TPSG1, STX5, PLA2R1, PTH2R, PNPLA3, MAST2, MAP6, EHD2, NPHS2, RMC1, VSTM5, ARHGAP17, SNCA, PSD4, PTPRO, SREBF1, EHD1, EHD4, AIF1L, CD34, EVI2A, ENG, CR1, AKAP12, COL6A2, CACNA1C, LIMS2, ITGA8, EHD3, LZTR1, NFXL1, KIAA0040, NEU4,
   [0488] f. Tissue protected: Kidney (tubules) TMEM243, ZDHHC2, ZDHHC6, TREH, ACER3, UBE2J1, SELPLG, SLC5A12, SLC12A1, SLC25A40, S1PR2, SLC34A3, SLC25A33, MGAM, PTH1R, PDGFC, RHBG, WHAMM, DLC1, RNF215, KCNH8, UCHL1, MGAT4B, UPK3BL2, RASA4, STX5, TMEM52B, OSBPL7, LRRC55, PNPLA3, SLC8A1, OBSCN, SLC22A6, TMEM72, UGT3A1, SLC3A1, XKR9, VSIG10, ATP6V0A4, VSTM5, ZP2, QTRT1, TMEM252, TMEM174, UNC13B, UPK3BL1, ARHGAP17, SLC28A1, SCAMP5, SLC22A8, SNX6, SLC6A18, SLC13A2, TMEM184A, SLC4A4, SREBF1, SLC35G2, VTCN1, TSPAN16, ENPP6, JAM3, DPEP1, ENPP3, CUBN, GSDMC, PHKA1, AIF1L, GPC5, ADCY7, CDH6, FAM126B, CASR, FOLH1, CLIC4, ANKRD13A, CARMIL2, EPCAM, BSND, AQP6, ANK2, SH3BP5, SLC7A9, ACE, AQP3, EPB41L3, C12orf66, ATP12A, CACNA1C, CDH16, B3GAT1, ABCC5, IFFO1, MC4R, MARCKS, MCUB, GNG12, FMO1, LRP2, LZTR1, CHL1, OR10R2, NSMF, NDST2,
   [0489] g. Tissue protected: Heart (cardiomyocytes) SLC30A4, UCP3, MGAT4C, RASL10B, SLC14A1, SLC22A15, TLN2, SGCB, SLC25A33, RNF145, POPDC2, PLN, SGCG, SRL, MXRA7, PPP1R3A, LANCL2, LRRC55, PLPP7, SLC8A1, DMPK, OBSCN, YRDC, ZP2, ARHGAP17, ATG2B, PHKA1, DSP, ADCY7, CDH6, CDH15, FNDC5, FAM126B, RASGRP2, SLC2A4, HHATL, FAM168B, CHRNA1, CD248, GPAT2, CAMK2B, ABHD16A, CDC42SE1, ANK2, ATP1A3, CPT1B, CDH13, AKAP6, BCL2L13, CNPPD1, CACNA1C, PAM, ABCC5, MYZAP, NCAM1, GPR182, MC4R, GPR15, MLIP, SLC16A10, NFXL1, OR10R2, DES,
   [0490] h. Tissue protected: Thyroid SLC30A4, ZDHHC6, VPS33B, SLC22A15, TGFBR3, SLC5A5, SLC25A33, RNF145, TPO, TRPV6, RHBDD2, RNF215, MXRA7, OSBPL7, LANCL2, PSD3, LRRC55, SLC8A1, OBSCN, TMEM41A, UNC13B, ARHGAP17, RNFT2, SREBF1, IYD, DUOX1, CDH6, FYN, FAM126B, ANKRD13A, CARMIL2, HCN1, IPCEF1, EPCAM, CLIC2, AAK1, CDH16, IBTK, MTNR1B, NCAM1, MC4R, GNG12, OR10R2,
   [0491] i. Tissue protected: Pancreatic endocrine cells (Islets) ZDHHC2, SCGN, TGFBR3, STX1A, RTN1, SCG3, RNF215, RAB3B, UCHL1, MXRA7, PTPRN, PTH2R, LRRC55, MAST2, SLC8A1, OBSCN, NECAB2, SLC17A6, XKR9, SV2A, YRDC, TMEM69, TSPAN7, SLC30A8, RNF103, SYP, PTPRN2, SLC35G2, ATG2B, C2CD2L, DGCR2, PHKA1, CDH6, GNAO1, CASR, DGKZ, ENO2, ATP1A2, CADPS, EPB41L3, PAM, GAD2, MC4R, MARCKS, OR10R2,
   [0492] j. Tissue protected: Pancreatic exocrine cells ZDHHC2, RASL10B, UBE2J1, SELPLG, TMEM97, RNF215, UPK3BL2, STX5, MXRA7, PTH2R, LRRC55, MAST2, OBSCN, SLC3A1, VSIG10, YRDC, SYCN, SLC4A4, DPEP1, CUZD1, KIRREL2, FA2H, ADCY7, CDH6, EVI2A, GPAT2, KDELR3, AQP12A, AQP12B, IBTK, IFFO1, MC4R, MARCKS, MCUB, SLC16A10, OR10R2,
[0493] 8. Cancer treated: stomach cancer
   [0494] a. Tissue protected: Colon UGT2A3, TMEM138, SCGN, TMEM245, SLC26A2, TEX2, SH3BP4, SCD5, SLC26A1, LDLR, PILRA, DLC1, RRAD, PIGU, RAB3B, STYK1, PTGDR, SNX1, SMPD2, OSBPL7, LRRC55, PALM, PLPP7, MSRA, OBSCN, MFN2, SLC26A3, SLC3A1, UGT2B17, VSIG10, TMEM236, VSTM5, UTRN, UGT2B28, TMEM69, SYTL3, TMEM41A, ZFYVE9, UGT2B15, SYP, SLC6A12, SNX6, TMEM204, ARHGEF12, ATG2B, C2CD2L, FMO5, ABCG2, CD177, CLCA1, GLP2R, FKBP2, ADGRF1, FAM126B, HTR1A, FGFRL1, GABARAPL1, FMNL3, CARMIL2, GBP2, LRRC37B, BEST2, ABCG8, BCL2, GAL3ST2, CLN5, B3GALT5, CDHR2, ACE2, CNTNAP3, CIB1, ASIC5, ABHD12, ALG14, CASD1, B3GAT1, IBTK, SLC9A3R2, SLC16A6, GFRA2, MCUB, JAML, NIPAL1, LZTR1, NEU4, OR10R2,
   [0495] b. Tissue protected: Lung TGM2, SLC30A4, TRIM13, TMEM245, SLC22A15, SLC25A17, SLC6A14, RNF144A, AGER, RECK, PTPRG, SNX1, GNAI3, PALM, EHD2, UTRN, PSD4, PHLPP2, GNAI1, EHD1, EHD4, CCR7, SLC44A2, AOC3, GABARAPL1, GBP2, AIFM2, CLIC2, AIG1, CAV1, AQP4, CACNA2D2, ACE, AP3S1, AP3S2, CACNA1C, DAPP1, CAVIN2, IBTK, LAMP3, EHD3, PI4KA, SLC34A2, ICAM1, LRRK2,
   [0496] c. Tissue protected: Skin TMEM243, TMEM138, CACNB2, CLEC10A, PERP, RXFP1, TGFBR3, RNF145, MTMR2, REEP2, TMEM134, ITGA9, SLC10A6, SNX1, GNAI3, PALM, LYPD3, KRT1, F2R, PLA2G4E, OBSCN, RMC1, ZP2, TMEM69, SYTL3, THBD, TACSTD2, ARHGEF12, C2CD2L, CLCA2, GNAI1, FA2H, CD177, ANO7, FAM126B, ATRAID, CD99, FMNL3, CAPNS2, ANKRD13A, GBP2, DSC3, B3GNT4, DSG1, ABCG8, ADGRF4, CLN5, CAV1, ASPRV1, CIB1, ORAI1, DSG3, CNPPD1, FGFR3, TACR1, OR10R2, TMEM243, MGAT4C, SLC6A14, SH3BP4, SLC26A1, ICAM3, LRRC55, PLPP7, DCT, RHCG, S100A8, PMEL, B3GNT5, FAT2, FAM210A, CARMIL2, MALL, CLEC2B, BCL2, BST1, CLEC2A, ALOX12, SLC2A11, ,
   [0497] d. Tissue protected: Liver TMEM138, TECR, CACNB2, CLEC10A, TRIM13, TMEM245, SYT13, ALPL, RNF144A, SLC27A2, SLCO1B3, SLCO1B1, SLC27A5, SERINC3, LDLR, RRAD, PIGU, PDZK1, RDH16, KCNQ4, SMPD2, NDUFAF5, LRRC55, SORD, SPRED1, UGT2B4, YIPF1, TFR2, ZDHHC8, TNS2, TBCD, SLC6A12, TMEM204, TSPAN2, FMO5, CYP2W1, CYP2D6, CD177, B3GNT5, FYN, GAS2, SLC2A2, HTR1A, CYP2A7, FGFRL1, EPHX1, CYP1A2, CYP3A4, FAM210A, FMNL3, CYP2A6, FMO3, GBP2, ABCB4, NINJ1, CYP2C8, CDH2, CLEC2B, KMO, CYP2C19, BCL2L10, AQP9, ABCA8, ABCG8, AIG1, CLN5, CDHR2, ASGR1, ABCB11, CYP2A13, CTSL, ASIC5, ASPHD1, HSD11B1, ASGR2, DAPP1, INTS2, CYP2C9, IBTK, SLC16A6, MFAP3L, POMGNT1, ABCC2, GAA, NPC1L1,
   [0498] e. Tissue protected: Kidney (glomeruli) TMEM138, TECR, LRIG1, TMEM245, KDR, SYT13, TGFBR3, SLC45A1, RNF144A, KIRREL1, TSPAN33, TRPV6, KSR2, RECK, PTPRG, MRGPRF, TPSG1, SCUBE1, SNX1, PLA2R1, PTH2R, F2R, MAP6, MRC2, EHD2, NPHS2, RMC1, VSTM5, UTRN, TNS2, SNCA, PSD4, PTPRO, SLC35B1, ARHGEF12, EHD1, EHD4, ADGRF1, CD34, EVI2A, ENG, CD99, FAM210A, FMNL3, CR1, GBP2, CLEC2B, ABCG8, CAV1, CACNA1C, ABCC1, SLC9A3R2, LIMS2, ITGA8, EHD3, LZTR1, KIAA0040, PI4KA, NEU4, ICAM1, DYSF,
   [0499] f. Tissue protected: Kidney (tubules) TMEM243, TRPM3, TREH, ARMCX2, CACNB2, STRA6, TMEM245, TM4SF18, UBE2J1, SELPLG, ALPL, SLC5A12, SLC5A2, TEX2, SLC12A1, RNF144A, SLC27A2, SCD5, RDX, SLC6A19, S1PR2, SLC34A3, SERINC3, SLC26A1, NEGR1, PTH1R, LDLR, RHBG, DLC1, RRAD, PIGU, PDZK1, KCNH8, KCNJ1, LIN7A, MRGPRF, UCHL1, MGAT4B, SLC34A1, UPK3BL2, PRICKLE1, TMEM52B, ITGA9, KCNQ4, SNX1, SMPD2, NDUFAF5, OSBPL7, GNAI3, LRRC55, NAT8, PALM, MSRA, KIRREL3, SORD, MPP5, OBSCN, MFN2, UGT2B4, ATP6V1D, SLC22A6, TMEM72, UGT3A1, XPNPEP2, SLC3A1, VSIG10, ATP6V0A4, VSTM5, UTRN, ZDHHC8, ZP2, QTRT1, TMEM252, TMEM174, TTC7B, ZFYVE9, RHCG, UPK3BL1, SLC28A1, SLC22A2, SCAMP5, SLC22A8, SLC6A12, RUFY3, SNX6, SLC6A18, SLC13A2, TMEM213, SYT7, TMEM204, SLC4A4, SLC35G2, OPRD1, TSPAN2, TSPAN16, ARHGEF12, ENPP6, GGT1, GNAI1, JAM3, ENPP3, CUBN, GSDMC, CPNE6, SLC44A2, GJA5, ADCY7, B3GNT5, GAS2, FKBP2, SLC2A2, FAM126B, HTR1A, CALCR, CREB3L2, FGFRL1, GABARAPL1, ATRAID, CASR, FOLH1, CLIC4, FAM210A, ANKRD13A, CARMIL2, GBP2, CDH2, CLEC2B, KMO, LRFN4, BSND, BCL2L10, AQP6, ABCG8, CDC42EP5, BCL2, MPP1, CLN5, CDHR2, ANK2, SH3BP5, SLC7A9, CLDN10, SLC25A31, FXYD2, ACE, CMKLR1, COX7B, TMEM63B, AP1S3, ASPHD1, EPB41L3, ATP12A, CACNA1C, CDH16, B3GAT1, INTS2, ABCC5, SLC16A6, GFRA2, KCND1, KCNK5, MCUB, NIPAL1, LRP2, LZTR1, ALOX12, CHL1, POMGNT1, PI4KA, SLC2A11, OR10R2, ABCC2, MDGA2, DYSF, LRRK2,
   [0500] g. Tissue protected: Heart (cardiomyocytes) TGM2, TCTN2, SLC30A4, SLC27A6, TMEM138, TECR, UCP3, ARMCX2, CAP2, CD36, MGAT4C, SLC14A1, SLC22A15, TRPV4, SLC25A17, SUSD3, TEX2, TLN2, RNF144A, SCD5, SGCB, RNF145, NEGR1, BVES, P2RX6, TSPAN33, POPDC2, P2RY6, PLN, RRAD, SGCG, SRL, KCNQ4, SMPD2, NDUFAF5, LANCL2, LRRC55, PLPP7, OBSCN, MFN2, YRDC, UTRN, ZP2, TBC1D3, SLC6A12, SLCO2B1, TMEM204, TEX261, ATG2B, CKMT2, CYP2W1, ADCY7, CDH15, GNB5, FAM126B, HTR1A, CAVIN4, SLC2A4, FGFRL1, HHATL, GABARAPL1, CHRNA1, CD248, FMNL3, GPAT2, DAG1, GBP2, CAMK2B, LRRC37B, CDH2, CLEC2B, LEPROTL1, ABHD16A, ABCG8, DMD, CDC42SE1, CDHR2, ANK2, CNTNAP3, CAV1, CSF3R, ATP2A2, CAV3, CPT1B, COX7B, CDH13, CIB1, ORAI1, AKAP6, ADGRG6, ADRB1, AP1S3, CNPPD1, CACNA1C, ABCC5, SLC16A6, MYZAP, MFAP3L, NCAM1, GPR182, KCND1, GPR15, MLIP, POMGNT1, PI4KA, OR10R2, PRKCA, DES, DYSF,
   [0501] h. Tissue protected: Thyroid SLC30A4, ARMCX2, TMEM100, TMEM245, VPS33B, SLC22A15, TRPV4, TGFBR3, TEX2, RNF144A, SCNN1D, RNF145, TPO, TSPAN33, TRPV6, RHBDD2, PIGU, SNX1, OSBPL7, LANCL2, PSD3, LRRC55, MSRA, SORD, OBSCN, MFN2, UTRN, SYTL3, TBC1D3, TBCD, TMEM41A, ZFYVE9, ARHGEF12, IYD, DUOX1, CYP2W1, B3GNT5, FYN, FKBP2, FAM126B, FGFRL1, GABARAPL1, CD99, FMNL3, ANKRD13A, CARMIL2, IPCEF1, CYP4X1, MALL, CLIC2, ABCG8, BCL2, CLN5, AAK1, CAV1, ARRDC1, AP1S3, CDH16, CAVIN2, IBTK, MTNR1B, NCAM1, GFRA2, POMGNT1, OR10R2, GAA,
   [0502] i. Tissue protected: Pancreatic endocrine cells (Islets) LRIG1, ARMCX2, CACNB2, SCGN, TRPV4, SLC25A17, TGFBR3, STX1A, RNF144A, RTN1, SCG3, PTGDR2, RAB3B, UCHL1, KCNQ4, SMPD2, PTPRN, PTH2R, GNAI3, LRRC55, OBSCN, MFN2, NECAB2, SLC17A6, ATP6V1D, SV2A, YRDC, ZDHHC8, TMEM69, TSPAN7, TBC1D3, ZFYVE9, SLC30A8, SYP, RUFY3, TEX261, SLC35G2, ARHGEF12, ATG2B, C2CD2L, GNAI1, DGCR2, CYP2W1, B3GNT5, GNAO1, FAM169A, FGFRL1, CASR, CD99, FMNL3, GBP2, CDH2, ABCG8, ENO2, FXYD2, ATP1A2, ARRDC1, ASIC5, CFC1, EPB41L3, GAD2, DAPP1, KCND1, PI4KA, OR10R2, LRRC24, MDGA2, GAA,
   [0503] j. Tissue protected: Pancreatic exocrine cells TMEM245, UBE2J1, SELPLG, STIMATE, TEX2, SH3BP4, TMEM97, TSPAN33, UPK3BL2, SNX1, SMPD2, PTH2R, LRRC55, MSRA, OBSCN, SPRED1, SLC3A1, VSIG10, YRDC, UTRN, ZDHHC8, TMEM128, TBC1D3, SYCN, SLCO2B1, TMEM204, SLC4A4, ARHGEF12, CUZD1, KIRREL2, FA2H, ADCY7, B3GNT5, FKBP2, EVI2A, FGFRL1, EPHX1, FAM210A, GPAT2, GBP2, LEPROTL1, CLN5, ACE2, CFTR, CLDN10, FXYD2, ARRDC1, ASPHD1, DAPP1, IBTK, MCUB, POMGNT1, SLC2A11, OR10R2, GAA,
[0504] 9. Cancer treated: cervical cancer
   [0505] a. Tissue protected: Colon TMED6, SCN4B, TMEM138, SLC7A6, DST, GABARAPL2, SCGN, SLC47A1, PCSK5, SLC22A16, SNX24, SMIM24, SPIRE1, SIRPB1, PILRA, TPCN1, DLC1, PLCB3, SLC25A20, PVR, RNF144B, RAB3B, SEL1L3, SLC25A36, STYK1, MAPKAP1, SLC9A3, ITLN1, PTGDR, PCDHB15, SNX7, SLC11A1, MPC2, PEX10, MGLL, OSBPL7, PCDH11X, ITPR2, MFSD11, CNEP1R1, OBSCN, SLC3A1, VSIG10, TMEM236, TMEM41A, ZFYVE9, RINT1, TMEM86A, C2orf88, SPHK1, RAB27A, SYP, PIGZ, PTPRN2, SLC6A12, SNX6, VTI1B, SLC38A5, SUSD1, REEP4, TMEM39B, ACVR1B, EFHD1, DPEP1, FKRP, KCNMB3, CX3CR1, SLC48A1, CLEC16A, FCER1G, CLCA1, ADGRF1, CLN6, FGFRL1, DMTN, FXYD6, ADGRA3, CA4, HHAT, LRRC37B, MAGI1, MAN1C1, AP3M1, CDK14, GAL3ST2, APOBR, ACE2, ANPEP, CNTNAP3, ADCK5, ASIC5, ARL4C, TMEM37, ABHD12, ATP8B1, EBP, ALG14, CASD1, B3GAT1, IBTK, SLC9A3R2, LFNG, KCNN3, GFRA2, KIAA2013, NIPAL1, IL17RA, GPA33, RPS6KC1, LZTR1, MUC13, MRAP, MT-ND4, NEU4, OR10R2, NDUFB9, NDST2,
   [0506] b. Tissue protected: Lung SLC30A4, TRIM13, SLC22A15, SLC25A17, RNF144A, AGER, PAG1, VAT1, IL10RB, RECK, RNF144B, PTPRG, STX5, MXRA7, PSD4, VTI1B, STEAP1, PHLPP2, FCER1G, CCR7, CYB5A, SLC44A2, AOC3, DCBLD1, AIFM2, AP3M1, FCAR, ELMO2, AQP4, CACNA2D2, ACE, CACNA1C, CAVIN2, IBTK, LAMP3, LFNG, LDLRAD2, PI4KA, NSMF, SLC34A2, LRRK2,
   [0507] c. Tissue protected: Skin SCN4B, TMEM138, CACNB2, ACER3, TGFBR3, ENPP1, SPIRE1, VAT1, REEP2, MGLL, F2R, OBSCN, RMC1, TMEM260, ZP2, TMEM86A, C2orf88, VTI1B, GJB4, FA2H, DSP, DMTN, ADGRA3, CD99, GSDMA, AP3M1, B3GNT4, DSG1, APOBR, ASPRV1, ATP8B1, RPS6KC1, OR10R2, SCN4B, TYR, SEL1L3, SLC11A1, MPC2, ITPR2, DCT, PMEL, A RHGAP21, REEP4, CYB561A3, FAT2, HCN1, MALL, BBS1, CLEC2A, ALOX12, ,
   [0508] d. Tissue protected: Liver TMEM138, APLNR, CACNB2, CCND1, TRIM13, SYT13, PCSK5, ALPL, SLC22A16, RAB17, ENPP1, SLC38A9, RNF144A, SLC25A40, SLC27A2, SLCO1B3, SPIRE1, SLCO1B1, SLC27A5, TPCN1, VAT1, SLC25A20, RNF144B, RDH16, SLC25A36, STX5, KCNQ4, MAPKAP1, MPC2, MGLL, ITPR2, MFSD11, MME, SLC25A15, UGT2B4, TFR2, TMEM260, TNS2, RINT1, SLC6A12, VTI1B, TSPAN2, ACVR1B, FCER1A, EVA1A, KCNMB3, SLC48A1, CLEC16A, CYP2D6, CYB5A, CACNA1A, FYN, GAS2, SLC2A2, CYP2A7, FGFRL1, CYP1A2, FXYD6, CYP3A4, CYP2A6, HHAT, KCNJ16, ABCB4, NINJ1, CYP2C8, CDH2, FES, CDK14, CYP2C19, BCL2L10, AQP9, ABCA8, AP1S2, ANPEP, ENPEP, ASGR1, ABCB11, CYP2A13, ASIC5, BBS1, HSD11B1, ATP8B1, EBP, ASGR2, CYP3A43, INTS2, CYP2C9, IBTK, LHFPL2, MFAP3L, GK, IGFLR1, MRAP, ABCC2, DPP4, SLC10A1, NPC1L1,
   [0509] e. Tissue protected: Kidney (glomeruli) TMEM138, DST, ACER3, MAPT, SYT13, TGFBR3, RAB17, SLC45A1, RNF144A, SPIRE1, KIRREL1, ITGB1, RECK, PVR, PTPRG, MRGPRF, TPSG1, STX5, SCUBE1, PLA2R1, PTH2R, ITPR2, PNPLA3, F2R, MME, NPHS2, RMC1, TNS2, SNCA, PSD4, PTPRO, SREBF1, VASN, HYAL2, CX3CR1, DCBLD1, ADGRF1, EVI2A, DMTN, ENG, CD99, CR1, AQP1, ENPEP, CACNA1C, SLC9A3R2, LIMS2, GPR153, ITGA8, LDLRAD2, LZTR1, NFXL1, NPHS1, KIAA0040, PI4KA, NEU4, DYSF, DPP4,
   [0510] f. Tissue protected: Kidney (tubules) VNN1, TTYH3, SCN4B, TRPM3, TREH, DST, CACNB2, ACER3, FCAMR, GABARAPL2, UBE2J1, SLC47A1, MAPT, PCSK5, ALPL, SLC22A16, RAB17, ENPP1, SMIM24, SLC5A12, SLC5A2, SLC12A1, RNF144A, SLC25A40, SLC27A2, SPIRE1, SLC6A19, S1PR2, SLC34A3, MGAM, ARHGAP5, NEGR1, PTH1R, TPCN1, VAT1, VHL, PTPRD, DLC1, SLC25A20, RNF144B, KCNH8, LIN7A, MRGPRF, SEL1L3, UCHL1, S LC25A36, STX5, KCNQ4, MAPKAP1, SNX7, MPC2, MGLL, OSBPL7, ITPR2, NAT8, PNPLA3, PLCD4, KIRREL3, MFSD11, CNEP1R1, MME, SLC25A15, OBSCN, UGT2B4, ATP6V1D, SLC22A6, TMEM72, XPNPEP2, SLC3A1, VSIG10, ATP6V0A4, SLC7A7, TMEM260, UST, ZP2, QTRT1, TMEM252, TMEM174, TTC7B, ZFYVE9, RINT1, TMPRSS2, SLC28A1, SLC22A2, SPHK1, SCAMP5, SLC22A8, PIGZ, SLC6A12, RUFY3, SNX6, SLC6A18, SLC13A2, TMEM213, VTI1B, SLC4A4, SLC25A23, SREBF1, ARHGAP21, REEP4, SLC35G2, OPRD1, TSPAN2, VASN, TSPAN16, TMEM39B, ENPP6, EFHD1, GGT1, DPEP1, ENPP3, CUBN, FKRP, FCER1A, EVA1A, GREB1, HYAL2, KCNMB3, CX3CR1, SLC48A1, CLEC16A, CPNE6, CYB5A, SLC44A2, GJA5, DAB2, GAS2, SLC2A2, CLN6, CREB3L2, FGFRL1, CASR, FOLH1, DMTN, FXYD6, CLIC4, HHAT, KCNJ16, CDH2, FES, MAGI1, AP3M1, CDK14, BSND, BCL2L10, AQP6, AQP1, CDC42EP5, MPP1, AP1S2, SH3BP5, ANPEP, ENPEP, SLC7A9, CLDN10, SLC25A31, FXYD2, ACE, ADCK5, CMKLR1, TMEM63B, ACVRL1, ARL4C, ANXA13, BBS1, TMEM37, EPB41L3, ATP8B1, ATP12A, ATG9A, CACNA1C, CYP3A43, B3GAT1, INTS2, ABCC5, LFNG, LHFPL2, NDUFS1, GFRA2, KCND1, KCNK5, GK, KIAA2013, NIPAL1, FMO1, LRP2, LZTR1, ALOX12, MRAP, MT-ND4, NXPE2, PI4KA, OR10R2, GRIN2D, NDUFB9, NSMF, ABCC2, DYSF, DPP4, LRRK2, NDST2,
   [0511] g. Tissue protected: Heart (cardiomyocytes) TTYH3, TCTN2, SLC30A4, SCN4B, TMEM138, SLC7A6, UCP3, DST, APLNR, GABARAPL2, RASL10B, SLC14A1, TMEM106B, SLC22A15, PCSK5, SLC25A17, SLC22A16, RAB17, SNX24, SUSD3, PITPNM1, RNF144A, SLC4A10, SIRPB1, SGCB, NEGR1, BVES, TPCN1, P2RY6, SLC25A20, PLN, PVR, RNF144B, SGCG, KCNQ4, MAPKAP1, SNX7, MPC2, MXRA7, PPP1R3A, LANCL2, ITPR2, MFSD11, CNEP1R1, DMPK, SLC25A15, OBSCN, UST, ZP2, RINT1, TMEM86A, C2orf88, SLC6A12, VTI1B, SLCO2B1, ST8SIA2, TEX261, ARHGAP21, VASN, TMEM39B, GREB1, CLEC16A, CKMT2, DSP, CACNA2D1, CDH15, DCBLD1, RASGRP2, CAVIN4, FGFRL1, HHATL, FXYD6, CHRNA1, ADGRA3, CD248, FXYD7, GPAT2, HHAT, CAMK2B, KCNJ16, LRRC37B, CDH2, FES, LEPROTL1, AP3M1, ABHD16A, DMD, AP1S2, CDC42SE1, CNTNAP3, CSF3R, ADCK5, CAV3, CPT1B, CDH13, AKAP6, ADRB1, ARL4C, BBS1, AP4E1, ATP8B1, BCL2L13, ATG9A, CACNA1C, PAM, ABCC5, MYZAP, LFNG, MFAP3L, NCAM1, GPR182, NDUFS1, KCND1, GPR15, IGFLR1, LDLRAD2, NFXL1, MRAP, MT-ND4, PI4KA, OR10R2, NDUFB9, DES, DYSF, GPR63,
   [0512] h. Tissue protected: Thyroid SLC30A4, SCN4B, APLNR, TMEM100, TMEM106B, VPS33B, SLC22A15, TGFBR3, RAB17, ENPP1, RNF144A, SCNN1D, TPO, TPCN1, RHBDD2, PVR, SEL1L3, MAPKAP1, SNX7, MPC2, MXRA7, OSBPL7, LANCL2, PSD3, MFSD11, CNEP1R1, OBSCN, TMEM260, UST, TMEM41A, ZFYVE9, TMEM86A, SLC26A4, VTI1B, SLC25A23, SUSD1, SREBF1, ARHGAP21, TMEM39B, IYD, CLEC16A, FCER1G, DAB2, FYN, CLN6, FGFRL1, FXYD6, CD99, HCN1, IPCEF1, MALL, KCNJ16, FES, MAGI1, AP3M1, CDK14, AAK1, ADCK5, ACVRL1, BBS1, AP4E1, ATP8B1, CAVIN2, IBTK, LFNG, LHFPL2, NCAM1, GFRA2, GK, IGFLR1, IL17RA, MRAP, OR10R2, GRIN2D,
   [0513] i. Tissue protected: Pancreatic endocrine cells (Islets) CACNB2, SCGN, SLC25A17, TGFBR3, STX1A, RNF144A, RTN1, SCG3, VAT1, VHL, PVR, RAB3B, UCHL1, KCNQ4, MPC2, MXRA7, PTPRN, PTH2R, MFSD11, OBSCN, NECAB2, SLC17A6, ATP6V1D, SV2A, TSPAN7, ZFYVE9, SLC30A8, SYP, PTPRN2, RUFY3, VTI1B, TEX261, SLC35G2, GREB1, DGCR2, GNAO1, FAM169A, FGFRL1, CASR, CD99, FKBP11, CDH2, ENO2, ELMO2, ATP9A, CLU, FXYD2, ADCK5, ATP1A2, CADPS, ASIC5, BBS1, EPB41L3, ATP8B1, PAM, GAD2, ALOX5, LFNG, KCND1, IGFLR1, LDLRAD2, MT-ND4, PI4KA, OR10R2, LRRC24, DPP4,
   [0514] j. Tissue protected: Pancreatic exocrine cells TMED6, GABARAPL2, RASL10B, UBE2J1, PCSK5, SLC22A16, RAB17, ENPP1, STIMATE, SLC4A10, SPIRE1, TMEM97, VAT1, VHL, SLC25A20, RNF144B, SEL1L3, SLC25A36, STX5, SNX7, MXRA7, PTH2R, NEURL1, ITPR2, OBSCN, SLC3A1, VSIG10, TMEM128, TMPRSS2, SPHK1, SYCN, VTI1B, SLC38A5, SLCO2B1, SLC4A4, SUSD1, REEP4, ACVR1B, DPEP1, CUZD1, GP2, KIRREL2, FA2H, CLEC16A, FCER1G, CLN6, EVI2A, FGFRL1, GPAT2, FKBP11, FES, MAGI1, LEPROTL1, AP3M1, AQP1, AP1S2, ACE2, ANPEP, CFTR, CLDN10, FXYD2, ADCK5, ARL4C, AP4E1, ATP8B1, ATG9A, PIK3AP1, AQP12A, AQP12B, IBTK, LFNG, IL17RA, MRAP, MT-ND4, OR10R2, NDUFB9,
[0515] 10. Cancer treated: skin cancer
   [0516] a. Tissue protected: Colon TSPAN12, AXL, TBC1D9B, TSPAN3, SCN4B, SFT2D2, SNX4, SMAGP, TMEM74B, SLC7A6, TNFSF14, ATP8B2, C2CD2, CORO7, ACY3, GABARAPL2, SLC46A1, SCGN, SLC47A1, PLPP2, SELENBP1, TREM2, SNX24, TMEM263, SMIM24, TMEM94, NAAA, SOCS7, PEX1, PLXNA1, PEMT, SLC25A46, NPDC1, NTRK1, RNF5, NAGPA, NBEA, PIGR, PLEKHA3, TPCN1, TVP23B, TULP3, TFPI, TJP3, WSCD1, RAB27B, RAB20, DLC1, RASD2, PIGU, SERP1, SPCS3, SLC25A36, SLCO4A1, SPPL3, SLC9A3, IFI27, ITLN1, PTGDR, TAOK2, MITD1, MPC2, PEX10, CD46, MGAT1, PCDH11X, KCNK1, MYORG, POMT2, HEG1, ILDR1, LYPLA1, KCNQ1, MGAT4A, MFSD11, CNEP1R1, DENND5B, OBSCN, TMEM159, AATK, MEGF8, PROM1, NUCB2, SERP2, TNFAIP8L3, SELENOT, VPS11, SLC3A1, SIGIRR, VSIG10, VPS28, TVP23C, UTRN, VPS35L, SYTL4, TMEM64, TSPAN31, TMEM41A, UNC13B, ZFYVE9, SYTL2, TMEM53, SLC35A3, MCUR1, OCLN, RNF125, SPHK1, SLC28A3, RAB27A, SYP, SUSD6, PIGZ, PTPRN2, SLC6A12, SLC6A15, SLC19A2, TGFBR1, VTI1B, SIGLEC14, TMEM204, MTG2, NAPG, SUSD1, TECPR1, IMMT, NAPB, RNF186, TMIGD2, VPS41, TMEM39B, ADCK2, ATG2B, CDHR5, ARL4D, ACVR1B, DPEP1, FKRP, FMO5, FKTN, KCNMB3, SLC48A1, FCER1G, GOLPH3, DMXL2, ABCG2, ACSL5, CLCA1, FAM171A1, GLP2R, CEACAM1, GCNT3, B4GALT4, CACNA1B, FPR2, DOK7, FKBP2, CHDH, ADGRF1, HTR1A, CLN6, DGKE, GATM, FZD2, HLA-DQB1, FXYD6, AQP8, CLMN, COQ2, DIAPH1, ELOVL1, WDPCP, CA12, CA4, C6orf89, HHAT, HRH1, GNG11, DGKQ, LRRC37B, CTDNEP1, DGAT1, LIME1, MAGI1, ENTPD8, FPGS, LPP, MALRD1, MAN1C1, AP3M1, CDK14, FER1L6, ANO8, BEST2, BRI3, GAL3ST2, HTR4, B3GNT8, ELOVL7, ERBIN, APOBR, CHPF2, CDHR2, SLC25A13, ACE2, ANPEP, CNTNAP3, CDH17, ATL2, CLCA4, CYB561, ALG2, COG8, ANKRD46, GRAMD1A, ATRN, ASIC5, ADGRL1, B3GNT6, ARL4C, ANO1, ABHD12, AGPS, CDH26, C12orf66, ALG14, CASD1, CHMP2B, B3GAT1, UGT8, FGFR4, IBTK, SMPD4, SLC9A3R2, NCEH1, KCNA5, LFNG, GIPC1, MC4R, GLCE, GFRA2, MCUB, SLC16A9, MSTO1, GNG12, GLRA2, SLC2A6, KIAA2013, KCNK10, NIPAL1, NIPAL4, GPA33, DPY19L1, LZTR1, MUC13, NOD2, HPS6, NEU4, OR10R2, SLC16A4, NDUFB9, ITSN1, PDLIM4, PSKH1, NDST2,
   [0517] b. Tissue protected: Lung TGM2, AXL, SLC30A4, TRIM13, SLC22A15, SELENBP1, TREM2, RNF144A, PLXNA1, AGER, PAG1, TVP23B, TFPI, PTPRG, SPCS3, STX5, CD46, KCNQ1, EHD2, SIGIRR, TVP23C, UTRN, RNF125, RNF103, SLC6A15, VTI1B, STEAP1, EHD1, EHD4, FCER1G, CCR7, CYB5A, SLC44A2, ACSL5, AOC3, HLA-DQB1, COQ2, CERS4, AIFM2, AP3M1, AQP4, CYB561, CACNA2D2, ACE, ADGRL1, CACNA1C, CADM1, DAPP1, CAVIN2, IBTK, NCEH1, LAMP3, LFNG, MC4R, EHD3, LDLRAD2, PI4KA, ITSN1, SLC34A2, PSKH1, LRRK2,
   [0518] c. Tissue protected: Skin SCN4B, SMAGP, TGFBR3, TMEM263, ENPP1, MIEF2, TULP3, TFPI, REEP2, SPCS3, OBSCN, AATK, TMEM260, ZP2, SLC35A3, RNF125, VTI1B, FA2H, DSP, DMXL2, ANO7, GATM, ATRAID, CD99, ELOVL1, CA12, LPP, AP3M1, B3GNT4, APOBR, ASPRV1, AGPS, OR10R2, PSKH1, SCN4B, MGAT4C, TYR, SLC25A33, NTRK1, RNF139, SUSD4, IFI27, MPC2, KCNQ1, NUCB2, VPS11, VPS28, DCT, MCUR1, PMEL, B3GNT5, DOK7, FZD2, CYB561A3, HCN1, MALRD1, ATRN, BBS5, BBS1, GIPC1, SLC16A9, ALOX12, ,
   [0519] d. Tissue protected: Liver TSPAN12, TBC1D9B, VDAC3, TNFSF14, LRP1, TRIM13, SYT13, SELENBP1, RAB17, ENPP1, TMEM94, NAAA, RNF144A, SLC25A40, SLC27A2, SLCO1B3, SLCO1B1, SLC25A33, SLC25A46, SLC25A43, SLC27A5, RNF5, PEX11G, NAGPA, TPCN1, TFPI, RAB20, PIGU, SLC25A36, STX5, SPPL3, KCNQ4, TAOK2, MPC2, CD46, KCNK1, MYORG, HEG1, ILDR1, LYPLA1, KCNQ1, MFSD11, DENND5B, SLC25A15, TMEM159, AATK, MEGF8, UGT2B4, SIGIRR, YIPF1, TMEM260, VAMP1, VPS35L, TMEM64, TNS2, TBCD, UNC13B, TSC2, SLC6A12, SNX19, SERINC1, SLC19A2, VTI1B, TMEM204, SLC35E1, TSPAN2, VPS41, TM4SF4, ACVR1B, FMO5, EVA1A, GHR, FKTN, KCNMB3, SLC48A1, CYP2W1, CYP2D6, CYB5A, ACSL5, FAM171A1, B3GNT5, CACNA1B, CACNA1A, GAS2, SLC2A2, HTR1A, CYP2A7, GATM, EPHX1, FZD2, CYP1A2, FXYD6, COX14, CYP3A4, DIAPH1, CYP2A6, CYP2B6, CERS4, FMO3, HHAT, CYP4V2, KCNJ16, NINJ1, CYP2C8, DHCR24, CDH2, CTDNEP1, FES, KMO, DGAT1, LIME1, MALRD1, CDK14, CYP2C19, BCL2L10, AQP9, ABCA8, BRI3, CYP26B1, ERBIN, CHPF2, CDHR2, SLC25A13, ANPEP, ASGR1, SLC31A1, ABCB11, CYP2A13, COG8, CYP2E1, ASIC5, ANO1, BBS1, ASPHD1, EPB41L5, ASGR2, CYP3A43, CHMP2B, DAPP1, INTS2, FGFR4, IBTK, LHFPL2, MFAP3L, GIPC1, GLCE, MSTO1, GK, SLC2A6, NIPAL4, IGFLR1, DPY19L1, HPS6, ABCC2, DPP4, PSKH1, SLC10A1, NPC1L1,
   [0520] e. Tissue protected: Kidney (glomeruli) CORO7, SYT13, TGFBR3, TREM2, RAB17, SLC45A1, RNF144A, PODXL, KIRREL1, PDGFRB, TSPAN33, TFPI, KSR2, RNF139, PTPRG, MRGPRF, TPSG1, STX5, PLA2R1, CD46, MGAT1, PTH2R, POMT2, MAG12, MAP6, EHD2, LDLRAD3, NPHS2, UTRN, TNS2, SNCA, NAPG, PTPRO, SLC35B1, VASN, ARL4D, EHD1, HYAL2, EHD4, ADGRF1, CD34, EVI2A, HLA-DQB1, ENG, CD99, CR1, LPP, CAPN2, ANO8, CRB3, ATL2, CLCA4, EPB41L5, AKAP12, CACNA1C, ABCC1, SLC9A3R2, LIMS2, ITGA8, EHD3, NIPAL4, LDLRAD2, LZTR1, NPHS1, HPS6, PI4KA, NEU4, DYSF, DPP4, PSKH1,
   [0521] f. Tissue protected: Kidney (tubules) TSPAN12, VNN1, AXL, TBC1D9B, VDAC3, SCN4B, SFT2D2, SNX4, TRPM3, TMEM74B, TREH, TNFSF14, C2CD2, ACY3, FCAMR, GABARAPL2, TM4SF18, UBE2J1, SLC47A1, SELPLG, PLPP2, SELENBP1, TREM2, RAB17, TMEM263, ENPP1, SMIM24, SLC5A12, SLC5A2, TMEM94, SLC12A1, NAAA, RNF144A, SLC25A40, SLC27A2, SMIM1, PEX1, PEMT, SLC6A19, SLC22A11, SIPR2, SLC34A3, SLC25A33, SLC25A46, ARHGAP5, RNF5, MIEF2, PEX11G, SRD5A3, NAGPA, NEGR1, PTH1R, PDGFC, NBEA, PIGR, RGS16, PLLP, TPCN1, TFPI, WSCD1, VHL, PTPRD, RAB27B, RAB20, DLC1, RASD2, MPP6, PIGU, LIN7A, MRGPRF, UCHL1, SERP1, SPCS3, MGAT4B, SLC34A1, UPK3BL2, RASA4, S LC25A36, STX5, PRICKLE1, SLCO4A1, SPPL3, KCNQ4, MITD1, MPC2, CD46, KCNK1, NAT8, MYORG, POMT2, ILDR1, LYPLA1, KCNQ1, MGAT4A, MFSD11, CNEP1R1, DENND5B, MPP5, SLC25A15, OBSCN, TMEM159, LDLRAD3, AATK, MEGF8, PROM1, UGT2B4, ATP6V1B1, SLC22A6, SERP2, TMEM72, TNFAIP8L3, VPS11, SLC3A1, SIGIRR, VSIG10, VPS28, ATP6V0A4, SLC7A7, TMEM80, TMEM260, VAMP1, UTRN, VPS35L, ZP2, VAC14, QTRT1, TMEM252, TMEM174, TMEM64, TTC7B, TSPAN31, UNC13B, ZFYVE9, SYTL2, TMPRSS2, TMEM255B, UPK3BL1, TSC2, SLC28A1, MCUR1, SLC22A2, OCLN, SPHK1, SLC28A3, SCAMP5, SLC22A8, SLC13A3, PIGZ, SLC6A12, SNX19, RUFY3, RAB11FIP5, SLC19A2, SLC6A18, SLC13A2, TGFBR1, TMEM213, VTI1B, SYT7, TMEM204, TMEM184A, SLC4A4, SLC25A23, NAPG, SRPRB, TECPR1, PKHD1, PRRT3, IMMT, SLC35E1, SLC35G2, OPRD1, NAPB, TRPV5, TSPAN2, TMIGD2, VASN, VPS41, TMEM39B, ADCK2, CDHR5, ARL4D, ENPP6, GGT1, DPEP1, ENPP3, CUBN, FKRP, EVA1A, GHR, GREB1, HYAL2, FKTN, GSDMC, KCNMB3, SLC48A1, CPNE6, CYB5A, SLC44A2, DMXL2, GJA5, ACSL5, FAM171A1, B4GALT4, B3GNT5, CACNA1B, GAS2, DOK7, FKBP2, SLC2A2, CHDH, HTR1A, CALCR, CLN6, CREB3L2, EMC10, GATM, FZD2, ATRAID, CASR, FOLH1, FXYD6, CLMN, CNTFR, COQ2, COX14, CDIPT, ELOVL1, CA12, CERS4, HHAT, HRH1, GNG11, DGKQ, KCNJ16, CDH2, CTDNEP1, FES, KMO, SLC2A5, LRFN4, LIME1, MAGI1, MALRD1, AP3M1, CDK14, BSND, BCL2L10, CAPN2, ANO8, AQP6, CDC42EP5, MPP1, CHPF2, CDHR2, SLC25A13, ANK2, ANPEP, SLC7A9, CPM, CLDN10, SLC31A1, ATL2, CLCA4, ALG2, S LC25A31, FXYD2, ACE, CMKLR1, ACKR3, CLDN2, COG8, COX7B, ANKRD46, GRAMD1A, ATRN, ADGRL1, TMEM63B, ACVRL1, BBS5, ARL4C, ANXA13, BBS1, ASPHD1, EPB41L3, AGPS, C12orf66, ATP12A, ATG9A, CACNA1C, CYP3A43, CDH16, CHMP2B, CADM1, B3GAT1, UGT8, INTS2, FGFR4, ABCC5, SMPD4, MOXD1, PDZD3, HAS3, KCNA5, LFNG, LHFPL2, GIPC1, NDUFS1, MC4R, GLCE, GFRA2, KCND1, KCNK5, MCUB, SLC16A9, MSTO1, GNG12, GK, SLC2A6, KIAA2013, NIPAL1, FMO1, DPY19L1, LRP2, LZTR1, ALOX12, HPS6, PI4KA, OR10R2, SLC16A4, GRIN2D, NDUFB9, ITSN1, ABCC2, MDGA2, PDLIM4, DYSF, DPP4, PSKH1, LRRK2, NDST2,
   [0522] g. Tissue protected: Heart (cardiomyocytes) TGM2, TBC1D9B, TCTN2, TSPAN3, VDAC3, SLC30A4, SLC27A6, SCN4B, SMAGP, SLC7A6, UCP3, CAP2, GABARAPL2, MGAT4C, SLC14A1, TMEM106B, SLC22A15, RAB17, SEZ6L2, SNX24, SUSD3, TMEM94, PITPNM1, RNF144A, SLC4A10, PLXNA1, SGCB, PEMT, SLC25A33, MIEF2, SRD5A3, NAGPA, NEGR1, BVES, P2RX6, TPCN1, TSPAN33, TFPI, RAB20, POPDC2, P2RY6, SERP1, SGCG, SLCO4A1, SRL, KCNQ4, MITD1, MPC2, MGAT1, MYORG, KCNQ1, MFSD11, CNEP1R1, DENND5B, DMPK, SLC25A15, OBSCN, TMEM159, AATK, MEGF8, NUCB2, PRIMA1, SERP2, SIPA1, RYR2, VPS11, YRDC, TMEM143, UTRN, ZP2, VAC14, TMEM64, TSPAN31, PTPRB, TSC2, RAB11FIP4, SUSD6, SLC6A12, SNX19, SERINC1, SLC19A2, VTI1B, SLCO2B1, TMEM204, PPM1L, SRPRB, TECPR1, TEX261, IMMT, VASN, VPS41, TMEM39B, ATG2B, GREB1, CKMT2, CYP2W1, DSP, DMXL2, FAM171A1, CACNA2D1, CDH15, DOK7, FNDC5, GNB5, HTR1A, CAVIN4, EMC10, SLC2A4, DGKE, HHATL, FZD2, FXYD6, CHRNA1, CNTFR, CD248, CDIPT, ELOVL1, WDPCP, GPAT2, C6orf89, HHAT, CYP4V2, DGKQ, CAMK2B, KCNJ16, LRRC37B, CDH2, CTDNEP1, FES, LIME1, LEPROTL1, AP3M1, ABHD16A, DMD, ERBIN, CDC42SE1, CHPF2, CDHR2, SLC25A13, ADAM28, ANK2, CNTNAP3, SLC31A1, CSF3R, ATL2, CAV3, COG8, CPT1B, COX7B, ANKRD46, AKAP6, ADGRG6, ADRB1, ARL4C, BBS1, AP4E1, BCL2L13, ATG9A, CACNA1C, UGT8, ABCC5, SMPD4, NCEH1, KCNA5, MYZAP, LFNG, MFAP3L, NCAM1, GIPC1, G PR182, NDUFS1, MC4R, GLCE, KCND1, MSTO1, GPR15, MLIP, NIPAL4, S LC16A10, IGFLR1, LDLRAD2, DPY19L1, PI4KA, ICA1, OR10R2, SLC16A4, NDUFB9, ITSN1, PRKCA, DES, DYSF, GPR63, PSKH1,
   [0523] h. Tissue protected: Thyroid TSPAN12, TBC1D9B, TSPAN3, SLC30A4, SCN4B, SFT2D2, SMAGP, TMEM74B, TNFSF14, C2CD2, TMEM100, TMEM106B, VPS33B, SLC22A15, TGFBR3, SELENBP1, TREM2, RAB17, TMEM263, ENPP1, TMEM94, RNF144A, SCNN1D, RHOA, PLXNA1, PEMT, SLC25A33, SLC25A46, NPDC1, NTRK1, RNF5, MIEF2, NAGPA, NBEA, TPO, TPCN1, TVP23B, TSPAN33, TULP3, TFPI, TJP3, LMAN2, PIGU, RNF139, SERP1, SPCS3, SUSD4, IFI27, MPC2, CD46, KCNK1, PSD3, POMT2, HEG1, ILDR1, KCNQ1, MGAT4A, MFSD11, CNEP1R1, DENND5B, OBSCN, AATK, PROM1, NUCB2, PRIMA1, SERP2, VPS28, TMEM260, TVP23C, UTRN, VPS35L, SYTL4, TBCD, TMEM41A, UNC13B, ZFYVE9, TMEM53, TSC2, OCLN, RNF125, SLC26A4, SLC19A2, VTI1B, RNFT2, PPM1L, SLC25A23, NAPG, SUSD1, TECPR1, IMMT, SLC35E1, VPS41, TMEM39B, IYD, DUOX1, GHR, FKTN, KIFC3, FCER1G, CYP2W1, F AM171A1, B3GNT5, FKBP2, CLN6, DGKE, HLA-DQB1, FXYD6, CD99, COQ2, DIAPH1, C6orf89, HCN1, IPCEF1, KCNJ16, CTDNEP1, FES, DGAT1, LIME1, MAGI1, AP3M1, CDK14, FZD5, ENTPD1, FIBP, ERBIN, CHPF2, AAK1, CLCA4, ALG2, ACKR3, COG8, ARRDC1, ATRN, ADGRL1, ACVRL1, BBS5, BBS1, AP4E1, AGPS, CDH16, CADM1, CAVIN2, IBTK, NLGN1, MTNR1B, LFNG, LHFPL2, NCAM1, GIPC1, MC4R, GFRA2, MSTO1, GNG12, GK, IGFLR1, FAM234B, HPS6, ICA1, OR10R2, GRIN2D, PDLIM4, PSKH1,
   [0524] i. Tissue protected: Pancreatic endocrine cells (Islets) TSPAN12, TSPAN3, VDAC3, SMAGP, STXBP1, SCGN, TGFBR3, PLPP2, STX1A, SEZ6L2, NAAA, RNF144A, RHOA, RTN1, NPDC1, NTRK1, SCG3, MIEF2, NBEA, TVP23B, TFPI, VHL, MPP6, PTGDR2, UCHL1, SERP1, KCNQ4, TAOK2, MPC2, PTPRN, CD46, PTH2R, KCNK1, POMT2, MGAT4A, MFSD11, OBSCN, AATK, NECAB2, NUCB2, SLC17A6, ATP6V1B1, SHISAL2B, VPS11, SV2A, YRDC, TVP23C, VAMP1, VAC14, TSPAN7, TMEM64, ZFYVE9, SLC30A8, TMEM255B, TMEM53, RNF103, SYP, PTPRN2, RUFY3, SLC19A2, VTI1B, SIGLEC14, PPM1L, NAPG, TECPR1, TEX261, IMMT, SLC35G2, NAPB, VPS41, ATG2B, GREB1, DGCR2, CYP2W1, DMXL2, FAM171A1, B3GNT5, DOK7, GNAO1, FAM169A, CASR, CD99, CNTFR, COQ2, DIAPH1, FKBP11, C6orf89, CDH2, CTDNEP1, MALRD1, FIBP, ENO2, ATP9A, CLU, CYB561, ALG2, FXYD2, ATP1A2, CADPS, COG8, ARRDC1, ASIC5, ADGRL1, BBS1, EPB41L3, CDH26, CADM1, GAD2, DAPP1, ALOX5, NLGN1, LFNG, GIPC1, MC4R, GLCE, KCND1, MSTO1, IGFLR1, LDLRAD2, HPS6, PI4KA, OR10R2, LRRC24, MDGA2, PDLIM4, DPP4, PSKH1,
   [0525] j. Tissue protected: Pancreatic exocrine cells TBC1D9B, SMAGP, TNFSF14, C2CD2, CHRM3, GABARAPL2, UBE2J1, SELPLG, PLPP2, RAB17, TMEM263, ENPP1, STIMATE, NAAA, SLC4A10, PLXNA1, PEMT, TMEM97, NTRK1, RNF5, NBEA, PLEKHA3, TVP23B, TSPAN33, TFPI, TJP3, VHL, RAB27B, MPP6, RNF139, SPCS3, UPK3BL2, SLC25A36, STX5, IFI27, MITD1, PTH2R, NEURL1, KCNK1, HEG1, KCNQ1, MGAT4A, OBSCN, TMEM159, AATK, MEGF8, PROM1, NUCB2, PRIMA1, SELENOT, VPS11, SLC3A1, SIGIRR, VSIG10, YRDC, TMEM80, TVP23C, VAMP1, UTRN, VAC14, SYTL4, TSPAN31, PTPRB, SYTL2, TMPRSS2, TMEM255B, TMEM53, OCLN, SPHK1, SYCN, SLC28A3, SUSD6, SERINC1, SLC19A2, VTI1B, SLCO2B1, TMEM204, MTG2, SLC4A4, NAPG, SRPRB, SUSD1, PKHD1, IMMT, ARL4D, ACVR1B, DPEP1, CUZD1, FKTN, GP2, KIFC3, KIRREL2, FA2H, FCER1G, GOLPH3, DMXL2, FAM171A1, B3GNT5, CACNA1B, DOK7, FKBP2, CLN6, EVI2A, GATM, EPHX1, AQP8, CLMN, CNTFR, COQ2, DIAPH1, WDPCP, GPAT2, FKBP11, CA12, CERS4, CYP4V2, DGKQ, CTDNEP1, FES, DGAT1, MAGI1, LEPROTL1, MALRD1, AP3M1, CYP26B1, KDELR3, ELOVL7, ERBIN, CHPF2, SLC25A13, CRB3, ACE2, ANPEP, CFTR, CLDN10, CYB561, ALG2, FXYD2, ACKR3, CCR4, COG8, ANKRD46, ARRDC1, ADGRL1, BBS5, ARL4C, AP4E1, ASPHD1, ATG9A, CADM1, DAPP1, ARFGAP3, AQP12A, AQP12B, FGFR4, IBTK, SMPD4, MOXD1, KCNA5, LFNG, GIPC1, MC4R, GLCE, MCUB, SLC2A6, SLC16A10, FAM234B, NOD2, HPS6, MYOC, OR10R2, SLC16A7, NDUFB9, PDLIM4, PSKH1,
[0526] 11. Cancer treated: endometrial cancer
   [0527] a. Tissue protected: Colon TMED6, UGT2A3, TMEM138, SLC7A6, TMEM60, SCGN, SMIM24, SOCS7, RAC1, PCDHGA10, SLC26A1, LDLR, PILRA, RAC3, DLC1, PLCB3, SDR16C5, RDH13, RAB28, SEL1L3, TMEM45A, SERP1, SPPL3, MAPKAP1, SLC9A3, PTGDR, PRKN, MYORG, PLPPR2, PLPP7, OBSCN, SERP2, SLC3A1, UGT2B17, VSIG10, TMEM106C, VAMP5, UTRN, VPS35L, UGT2B28, TMEM253, TOMM40L, UNC13B, SYTL2, TMX2, UGT2B15, RAB43, SYP, PIGZ, PTPRN2, SLC39A2, SLC39A14, SLC6A15, SNX6, TGFBR1, SLC38A5, REEP4, MSMO1, NAPB, TSNARE1, TRAF3IP3, TYRO3, TMEM39B, CDHR5, EFHD1, DPEP1, EMC9, GSDMB, CX3CR1, GRAP, PHKA1, ABCG1, ABCG2, CD177, CLCA1, GLP2R, FPR2, CLN6, DMTN, AQP8, CA4, DGKQ, IGSF11, LIME1, LPP, MAN1C1, EPHA10, FER1L6, ANO8, BEST2, BRI3, GAL3ST2, B3GNT8, FAM162A, DENND5A, ACE2, CNTNAP3, CDH17, AFG1L, B3GNT6, TMEM30B, DCXR, ABHD12, C12orf66, COMTD1, HSD3B7, ALG14, B3GAT1, PYCARD, SLC16A6, KCNN3, GFRA2, MCUB, KIAA2013, GPA33, DPY19L1, MUC13, NOD2, OR10R2, MAPK8IP1,
   [0528] b. Tissue protected: Lung SLC30A4, TRIM13, VIPR2, SLC22A15, SLC25A17, AGER, SDR16C5, RECK, PTPRG, EHD2, VAMP5, UTRN, PRRG2, PSD4, RAB43, SLC6A15, STEAP1, PHLPP2, EHD1, EHD4, CCR7, CYB5A, CAVIN1, GPC5, AOC3, AIFM2, CLIC2, FCAR, ELMO2, CAV1, CACNA2D2, ACE, AP3S1, CAV2, AP3S2, LAMP3, EHD3, NSMF, LRRK2,
   [0529] c. Tissue protected: Skin TMEM138, CLEC10A, PERP, VIPR2, RXFP1, TGFBR3, ENPP1, RAC1, PPP1R16B, RAC3, TMEM40, MTMR2, SDR16C5, RAB28, SLC10A6, LYPD3, KRT1, SLC8A1, OBSCN, TRPM2, ZP2, TMX2, LY6D, MSMO1, TSNARE1, TRAF3IP3, EMC9, GJB4, IGSF8, FA2H, PHKA1, DSP, CAVIN1, CD177, ANO7, ATRAID, DMTN, CAPNS2, DSC3, LPP, EPHA10, B3GNT4, DSG1, CAV1, CAV2, ASPRV1, DSG3, DCXR, CNPPD1, MAP1LC3B, OR10R2, MGAT4C, TYR, SLC26A1, SEL1L3, TMEM45A, ICAM3, PLPP7, DCT, RHCG, S100A8, PMEL, REEP4, TYRO3, GRAP, GPC5, CYB561A3, FAT2, FAM210A, HCN1, MALL, CLEC2B, FAM162A, BST1, AFG1L, CLEC2A, COMTD1, HSD3B7, PYCARD, ALOX12, MAPK8IP1, ,
   [0530] d. Tissue protected: Liver TMEM138, CLEC10A, TRIM13, STBD1, ENPP1, SLC25A40, SLCO1B3, SLCO1B1, SLC27A5, PPP1R16B, LDLR, RDH13, RDH16, TMEM45A, SPPL3, MAPKAP1, MYORG, PLPPR2, SLC8A1, MME, UGT2B4, TFR2, VAMP5, VPS35L, TNS2, TBCD, UNC13B, RAB43, SLC39A2, SLC39A14, MSMO1, TSNARE1, EVA1A, CYP2W1, CYP2D6, CYB5A, ABCG1, CD177, CACNA1A, FYN, GAS2, SLC2A2, CYP2A7, CYP1A2, CYP3A4, FAM210A, CYP2A6, CYP2B6, FMO3, CYP4V2, ABCB4, NINJ1, CYP2C8, DHCR24, CLEC2B, FES, LIME1, CYP2C19, BCL2L10, AQP9, ABCA8, BRI3, ENPEP, ASGR1, ABCB11, CYP2A13, TMEM30B, DCXR, CMTM8, ASGR2, CYP3A43, HSD3B7, CYP2C9, SLC16A6, MFAP3L, DPY19L1, ABCC2, SLC10A1, NPC1L1,
   [0531] e. Tissue protected: Kidney (glomeruli) TMEM138, ZAP70, VIPR2, KDR, TGFBR3, SLC45A1, KSR2, RECK, PTPRG, MRGPRF, TPSG1, PLA2R1, PRKN, PTH2R, PNPLA3, EHD2, MME, NPHS2, VAMP5, UTRN, TNS2, PRRG2, SNCA, PSD4, PTPRO, SREBF1, TYRO3, EHD1, HYAL2, CX3CR1, EHD4, CAVIN1, CD34, DMTN, ENG, FAM210A, CLEC2B, LPP, CAPN2, ANO8, AQP1, CAV1, ENPEP, CAV2, LIMS2, GPR153, ITGA8, EHD3, NPHS1, KIAA0040,
   [0532] f. Tissue protected: Kidney (tubules) VNN1, TRPM3, TREH, UBE2J1, SELPLG, ENPP1, SMIM24, SLC5A12, SLC5A2, SLC12A1, SLC25A40, SLC6A19, SLC22A11, SLC34A3, SLC26A1, NEGR1, PPP1R16B, PTH1R, LDLR, RHBG, PARVB, DLC1, RDH13, RAB28, KCNH8, LIN7A, MRGPRF, SEL1L3, SERP1, MGAT4B, SLC34A1, UPK3BL2, SPPL3, MAPKAP1, PRKN, NAT8, MYORG, PLPPR2, PNPLA3, SLC8A1, MME, OBSCN, UGT2B4, SLC22A6, SERP2, TMEM72, UGT3A1, XPNPEP2, SLC3A1, VSIG10, ATP6V0A4, SLC7A7, TMEM106C, UTRN, VPS35L, ZP2, QTRT1, TMEM252, TMEM174, UNC13B, RHCG, SYTL2, TMPRSS2, TMX2, UPK3BL1, SLC28A1, SLC22A2, SCAMP5, SLC22A8, SLC13A3, PIGZ, SLC39A2, SLC39A14, SNX6, SLC6A18, SLC13A2, TGFBR1, TMEM213, SLC4A4, SREBF1, REEP4, SLC35G2, OPRD1, NAPB, TSNARE1, TYRO3, TSPAN16, TMEM39B, CDHR5, ENPP6, EFHD1, DPEP1, EMC9, CUBN, EVA1A, HYAL2, GSDMC, CX3CR1, GRAP, PHKA1, CPNE6, CYB5A, ABCG1, GJA5, GPC5, DAB2, FAM151A, GAS2, SLC2A2, CLN6, CREB3L2, TM7SF2, ATRAID, CASR, DMTN, FAM210A, DGKQ, IGSF11, CLEC2B, FES, LIME1, SLC7A8, BSND, BCL2L10, CAPN2, ANO8, AQP6, AQP1, CDC42EP5, MPP1, DENND5A, SH3BP5, AFG1L, ENPEP, SLC7A9, SLC25A31, FXYD2, ACE, CLDN2, TMEM63B, DCXR, AP1S3, EPB41L3, C12orf66, COMTD1, ATP12A, CYP3A43, HSD3B7, B3GAT1, HAS3, SLC43A2, SLC16A6, GFRA2, MCUB, KIAA2013, MAP1LC3B, FMO1, DPY19L1, LRP2, ALOX12, CHL1, NXPE2, OR10R2, GRIN2D, NSMF, MAPK8IP1, ABCC2, LRRK2,
   [0533] g. Tissue protected: Heart (cardiomyocytes) SLC30A4, TMEM138, SLC7A6, UCP3, CD36, MGAT4C, RASL10B, SLC14A1, TMEM106B, VIPR2, SLC22A15, SLC25A17, STBD1, SUSD3, SLC4A10, NTRK3, NEGR1, PPP1R16B, BVES, PARVB, POPDC2, PLN, RAB28, SERP1, SGCG, SRL, MAPKAP1, LANCL2, MYORG, PLPP7, SLC8A1, DMPK, OBSCN, SERP2, SIPA1, YRDC, TMEM106C, TMEM143, VAMP5, UTRN, ZP2, TOMM40L, PRRG2, TMX2, SLC39A14, SLCO2B1, ST8SIA2, SCN7A, MSMO1, TSNARE1, TMEM39B, EMC9, GRAP, CKMT2, PHKA1, CYP2W1, DSP, CDH15, RASGRP2, CAVIN4, HHATL, FAM168B, CHRNA1, GPAT2, CYP4V2, DGKQ, CAMK2B, IGSF11, CLEC2B, FES, LIME1, LEPROTL1, ABHD16A, EPHA10, CDC42SE1, ATP1A3, DENND5A, CNTNAP3, CAV1, AFG1L, CAV2, CAV3, CDH13, AKAP6, ADGRG6, ADRB1, AP1S3, BCL2L13, CNPPD1, COMTD1, SLC16A6, MFAP3L, NCAM1, GPR182, GPR15, MLIP, DPY19L1, OR10R2, DES,
   [0534] h. Tissue protected: Thyroid SLC30A4, TMEM106B, VIPR2, SLC22A15, TGFBR3, ENPP1, SCNN1D, NTRK3, NUS1, TPO, RHBDD2, RDH13, RAB28, SEL1L3, SERP1, MAPKAP1, PRKN, LANCL2, PSD3, SLC8A1, OBSCN, SERP2, TMEM106C, UTRN, VPS35L, TBCD, UNC13B, PRRG2, RAB43, SLC39A2, RNFT2, SREBF1, TSNARE1, TYRO3, TMEM39B, IYD, DUOX1, EMC9, GRAP, CYP2W1, ABCG1, CAVIN1, DAB2, FYN, CLN6, HCN1, MALL, GDAP1, FES, LIME1, CLIC2, AAK1, CAV1, CAV2, CD300A, DCXR, AP1S3, CMTM8, COMTD1, NCAM1, GFRA2, MAP1LC3B, OR10R2, GRIN2D, MAPK8IP1,
   [0535] i. Tissue protected: Pancreatic endocrine cells (Islets) SCGN, SLC25A17, TGFBR3, STX1A, RTN1, SCG3, PTGDR2, SERP1, PTPRN, PTH2R, SLC8A1, OBSCN, NECAB2, SLC17A6, YRDC, TSPAN7, SLC30A8, PRRG2, SYP, PTPRN2, SLC39A2, SLC35G2, MSMO1, NAPB, DGCR2, PHKA1, CYP2W1, GNAO1, CASR, CD82, SLC7A8, DGKZ, ENO2, ELMO2, FXYD2, ATP1A2, CADPS, CFC1, EPB41L3, GAD2, ALOX5, MAP1LC3B, OR10R2,
   [0536] j. Tissue protected: Pancreatic exocrine cells TMED6, RASL10B, UBE2J1, SELPLG, ENPP1, STIMATE, SLC4A10, PPP1R16B, SEL1L3, UPK3BL2, PTH2R, NEURL1, OBSCN, SLC3A1, VSIG10, YRDC, TMEM106C, VAMP5, UTRN, TMEM128, SYTL2, TMPRSS2, TMX2, SYCN, SLC39A2, SLC39A14, SLC38A5, SLCO2B1, SLC4A4, SCN7A, REEP4, DPEP1, EMC9, CUZD1, KIRREL2, FA2H, GRAP, CLN6, AQP8, FAM210A, GPAT2, CYP4V2, DGKQ, FES, LEPROTL1, AQP1, KDELR3, FAM162A, ACE2, FXYD2, CAV2, CD300A, CMTM8, COMTD1, PIK3AP1, AQP12A, AQP12B, MCUB, NOD2, OR10R2,
[0537] 12. Cancer treated: breast cancer
   [0538] a. Tissue protected: Colon ZDHHC2, UGT2A3, TMEM138, TMEM60, C2CD2, RMDN2, LPCAT2, SLC26A2, SOCS7, NDUFS8, SLC19A3, PLPP1, WHAMM, DLC1, PLCB3, SLC25A20, PVR, RAB3B, SEL1L3, TMEM45A, SPPL3, STYK1, MAPKAP1, SLC9A3, IFI27, ITLN1, PTGDR, PEX10, OSBPL7, LRRC55, PLPP7, OBSCN, PLOD1, UGT2B17, VSIG10, UGT2B28, TMEM69, SYTL3, TMEM253, UGT2B15, SLC22A1, SYP, PIGZ, SLC39A2, S LC39A14, SLC6A15, SNX6, SDCBP2, REEP4, TMEM171, ATG2B, CRK, CDHR5, DPEP1, GSDMB, ABCG1, ABCG2, ACSLS, CD177, CLCA1, GLP2R, CEACAM1, GBA2, FPR2, HTR1A, GPR34, DMTN, CEACAM5, CA4, GNG11, IGSF11, EPHA10, FER1L6, BEST2, BRI3, GAL3ST2, B3GNT8, CDHR2, ACE2, CNTNAP3, CDH17, C1orf210, ASIC5, DCXR, EPB41L2, ABHD12, CDH26, IBTK, SLC16A9, KIAA2013, ITGB4, GPA33, LZTR1, MUC13, LBR, OR10R2, NDUFB9,
   [0539] b. Tissue protected: Lung SLC30A4, VIPR2, SLC22A15, SLC25A17, LPCAT2, AGER, WHAMM, PTPRG, SGIP1, EHD2, SLC6A15, STEAP1, PHLPP2, EHD1, EHD4, CCR7, CAVIN1, ACSL5, AIFM2, CLIC2, AIG1, FCAR, ELMO2, CAV1, AQP4, CACNA2D2, ACE, CAV2, ANXA1, EPB41L2, CAVIN2, IBTK, LAMP3, EHD3, MMP2, NSMF,
   [0540] c. Tissue protected: Skin TMEM243, ZDHHC2, TMEM138, CLEC10A, ACER3, PERP, VIPR2, PCDHB5, TMEM40, REEP2, TMEM134, SLC10A6, KRT1, PLA2G4E, OBSCN, RMC1, SRC, ZP2, TMEM69, SYTL3, TACSTD2, LY6D, TMEM171, CRK, FGFR2, IGSF8, FA2H, DSP, CAVIN1, CD177, GPR34, DMTN, CD99, DSC3, FGFBP1, FADS3, EPHA10, B3GNT4, DSG1, CAV1, CAV2, ANXA1, ASPRV1, ORAI1, DSG3, DCXR, TACR1, OR10R2, TMEM243, MS4A8, SEL1L3, TMEM45A, IFI27, LRRC55, PLPP7, DCT, RHCG, SDCBP2, RYK, PMEL, REEP4, CYB561A3, FAT2, HCN1, EPB41L2, SLC16A9, ITGB4, ,
   [0541] d. Tissue protected: Liver TMEM138, LRP1, CLEC10A, RMDN2, SYT13, SLC25A40, SLCO1B3, SLCO1B1, SLC25A43, SLC27A5, SLC19A3, RETSAT, SLC25A20, TMEM45A, SPPL3, MAPKAP1, LRRC55, MME, UGT2B4, TFR2, UGT1A6, SLC22A1, SLC39A2, SLC39A14, TMEM171, CRK, FGFR2, EVA1A, CYP2D6, ABCG1, ACSL5, CD177, GBA2, CACNA1A, GAS2, SLC2A2, HTR1A, CYP2A7, GPR34, CYP1A2, CYP3A4, CYP2B6, FM03, NINJ1, CYP2C8, CDH2, FES, CYP2C19, BCL2L10, AQP9, ABCA8, AIG1, BRI3, CDHR2, ENPEP, ASGR1, ABCB11, CTSL, ASIC5, ACAD11, DCXR, HSD11B1, ASGR2, CYP2C9, IBTK, GRB14, ITGB4, ABCC2, DPP4, NPC1L1,
   [0542] e. Tissue protected: Kidney (glomeruli) TMEM138, ZDHHC6, ACER3, VIPR2, KDR, SYT13, SLC45A1, PCDHB5, PODXL, KIRREL1, PLPP1, TRPV6, WHAMM, ITGB1, KSR2, PVR, PTPRG, TPSG1, SCUBE1, PLA2R1, PTH2R, MAP6, EHD2, MME, NPHS2, RMC1, SLC22A1, SNCA, SDCBP2, RYK, PTPRO, SLC35B1, TMEM171, VASN, EHD1, HYAL2, EHD4, CAVIN1, CD34, GPR34, DMTN, ENG, CD99, GPRC5B, FADS3, AQP1, CAV1, ENPEP, CAV2, ANXA1, EPB41L2, ABCC1, LIMS2, GPR153, ITGA8, EHD3, LZTR1, NFXL1, DYSF, DPP4,
   [0543] f. Tissue protected: Kidney (tubules) TMEM243, TTYH3, ZDHHC2, TRPM3, ZDHHC6, TREH, C2CD2, ACER3, FCAMR, RMDN2, SLC5A12, SLC12A1, SLC25A40, PCDHB5, SLC6A19, S1PR2, NDUFS8, SLC34A3, SLC19A3, MGAM, ARHGAP5, RETSAT, NEGR1, RHBG, VPS26B, VHL, WHAMM, PTPRD, DLC1, SLC25A20, KCNH8, KCNJ1, LIN7A, SEL1L3, UCHL1, MGAT4B, UPK3BL2, TMEM132E, PRICKLE1, SPPL3, MAPKAP1, OSBPL7, LRRC55, NAT8, KIRREL3, MME, OBSCN, UGT2B4, SLC22A6, TMEM72, UGT3A1, VSIG10, ATP6V0A4, SLC7A7, SRC, ZC3H12A, ZP2, QTRT1, UGT1A6, TMEM252, TMEM174, TTC7B, RHCG, TMPRSS2, UPK3BL1, SLC28A1, SLC22A1, SLC22A2, SCAMP5, SLC22A8, SLC13A3, PIGZ, SLC39A2, SLC39A14, SNX6, SLC6A18, SLC13A2, TMEM213, SLC4A4, SDCBP2, RYK, REEP4, SLC35G2, TMEM171, VASN, CRK, CDHR5, ENPP6, DPEP1, ENPP3, CUBN, EVA1A, HYAL2, GSDMC, ABCG1, GJA5, ACSL5, CDH6, FAM151A, GBA2, GAS2, SLC2A2, HTR1A, CREB3L2, GPR34, CASR, FOLH1, DMTN, CLIC4, GNG11, GPRC5B, IGSF11, CDH2, FES, SLC7A8, BSND, BCL2L10, AQP6, AQP1, CDC42EP5, MPP1, CDHR2, SH3BP5, ENPEP, FXYD2, ACE, CLDN2, COX7B, C1orf210, DCXR, ATP12A, CDH16, ABCC5, SLC43A2, KCNK5, SLC16A9, KIAA2013, LZTR1, NXPE2, OR10R2, NDUFB9, NSMF, ABCC2, DYSF, DPP4,
   [0544] g. Tissue protected: Heart (cardiomyocytes) TTYH3, SLC30A4, TMEM138, UCP3, VIPR2, RMDN2, SLC22A15, SLC25A17, PITPNM1, PCDHB5, SGCB, NDUFS8, SLC19A3, RETSAT, NEGR1, P2RY6, S LC25A20, PLN, PVR, SGCG, SRL, MAPKAP1, LRRC55, PLPP7, OBSCN, SIPA1, TMEM143, ZC3H12A, ZP2, SLC22A1, RAB11FIP4, SLC39A14, SLCO2B1, TEX261, TMEM171, VASN, ATG2B, FGFR2, CKMT2, DSP, CDH6, CACNA2D1, CDH15, GBA2, FNDC5, RASGRP2, HTR1A, HHATL, FAM168B, GPR34, CHRNA1, CD248, GPAT2, CAMK2B, IGSF11, CDH2, FES, LEPROTL1, EPHA10, CDC42SE1, CDHR2, ADAM28, CNTNAP3, CAV1, CSF3R, CAV2, CAV3, CPT1B, COX7B, CDH13, ORAI1, ADGRG6, ADRB1, ACAD11, BCL2L13, ABCC5, GRB14, GPR182, GPR15, MLIP, ITGB4, NFXL1, OR10R2, NDUFB9, DES, DYSF,
   [0545] h. Tissue protected: Thyroid SLC30A4, ZDHHC6, C2CD2, TMEM100, VIPR2, RMDN2, SLC22A15, SLC5A5, LPCAT2, PCDHB5, SLC19A3, RETSAT, NUS1, TPO, TRPV6, VPS26B, PVR, SEL1L3, MAPKAP1, IFI27, OSBPL7, PSD3, LRRC55, OBSCN, ZC3H12A, SYTL3, SLC26A4, SLC39A2, SDCBP2, RYK, IYD, FGFR2, KIFC3, ABCG1, CAVIN1, CDH6, GBA2, GPR34, CD99, HCN1, IPCEF1, GDAP1, FES, CLIC2, AAK1, CAV1, CAV2, DCXR, CDH16, CAVIN2, IBTK, MTNR1B, OR10R2, IKBIP,
   [0546] i. Tissue protected: Pancreatic endocrine cells (Islets) ZDHHC2, STXBP1, SLC25A17, STX1A, RTN1, SCG3, VHL, PTGDR2, PVR, RAB3B, UCHL1, PTPRN, PTH2R, LRRC55, OBSCN, NECAB2, SLC17A6, SHISAL2B, SV2A, TMEM69, TSPAN7, SLC30A8, SYP, SLC39A2, SDCBP2, TEX261, SLC35G2, ATG2B, FGFR2, DGCR2, CDH6, GBA2, GNAO1, FAM169A, GPR34, CASR, CD99, CDH2, SLC7A8, ELMO2, FXYD2, CADPS, ASIC5, CFC1, CDH26, GAD2, ALOX5, OR10R2, DPP4,
   [0547] j. Tissue protected: Pancreatic exocrine cells ZDHHC2, C2CD2, RMDN2, TMEM97, SLC19A3, VHL, SLC25A20, SEL1L3, UPK3BL2, IFI27, PTH2R, NEURL1, LRRC55, OBSCN, NUP54, VSIG10, ZC3H12A, TMPRSS2, SYCN, SLC39A2, SLC39A14, SLCO2B1, SLC4A4, RYK, REEP4, CRK, DPEP1, CUZD1, KIFC3, KIRREL2, FA2H, CDH6, GBA2, GPR34, GPAT2, GPRC5B, FES, LEPROTL1, AQP1, KDELR3, ACE2, CFTR, FXYD2, CAV2, PIK3AP1, AQP12A, AQP12B, IBTK, GRB14, OR10R2, NDUFB9,

TABLE 3C

List of proteins that meet criteria and have at least high expression on tissues where immune cell inhibition is desired (Ensembl version 92.38 ID for is provided for each gene symbol):
SELENBP1(ENSG00000143416), SMIM24(ENSG00000095932), RAB27B(ENSG00000041353), MUC1(ENSG00000185499),
SDC1(ENSG00000115884), TMEM45A(ENSG00000181458), PEX10(ENSG00000157911), CD46(ENSG00000117335),
TMEM236(ENSG00000148483), VPS35L(ENSG00000103544), TSPAN8(ENSG00000127324), SYTL2(ENSG00000137501),
SLC28A3(ENSG00000197506), PTAFR(ENSG00000169403), PIGZ(ENSG00000119227), SLC39A14(ENSG00000104635),
SLC6A15(ENSG00000072041), RAB25(ENSG00000132698), SLC20A2(ENSG00000168575), SPTLC3(ENSG00000172296),
MARK2(ENSG00000072518), CA2(ENSG00000104267), CDHR5(ENSG00000099834), CLDN4(ENSG00000189143),
DPEP1(ENSG0000001S413), ACSL5(ENSG00000197142), CLCA1(ENSG00000016490), DSG2(ENSG00000046604),
CEACAM5(ENSG00000105388), EPCAM(ENSG00000119888), BRI3(ENSG00000164713), CLDN8(ENSG00000156284),
GAL3ST2(ENSG00000154252), B3GNT8(ENSG00000177191), ELOVL7(ENSG00000164181), CLDN7(ENSG00000181885),
CDH17(ENSG00000079112), ATP11C(ENSG00000101974), C12orf66(ENSG00000174206), HHLA2(ENSG00000114455),
MAOA(ENSG00000189221), SLC9A3R2(ENSG00000065054), SLC2A6(ENSG00000160326), GPA33(ENSG00000143167),
MUC13(ENSG00000173702), SLC22A15(ENSG00000163393), SCEL(ENSG00000136155), SMURF1(ENSG00000198742),
AGER(ENSG00000204305), STEAP1(ENSG00000164647), CCR7(ENSG00000126353), CYB5A(ENSG00000166347),
FADS2(ENSG00000134824), LAMP3(ENSG00000078081), SLC34A2(ENSG00000157765), PERP(ENSG00000112378),
RAC1(ENSG00000136238), MTMR2(ENSG00000087053), TMEM134(ENSG00000172663), PROM2(ENSG00000155066),
KRT1(ENSG00000167768), STK16(ENSG00000115661), GJB4(ENSG00000189433), KCNJ8(ENSG00000121361),
DSP(ENSG00000096696), DSC3(ENSG00000134762), GSDMA(ENSG00000167914), DSG1(ENSG00000134760),
ADGRF4(ENSG00000153294), AQP3(ENSG00000165272), FGFR3(ENSG00000068078), PSKH1(ENSG00000159792),
SCEL(ENSG00000136155), SLC41A2(ENSG00000136052), ICAM3(ENSG00000076662), S100A8(ENSG00000143546),
DSC2(ENSG00000134755), FGFBP1(ENSG00000137440), OR10R2(ENSG00000198965), (), SELENBP1(ENSG00000143416),
SLCO1B3(ENSG00000111700), SLC25A43(ENSG00000077713), SLC27A5(ENSG00000083807), RDH16(ENSG00000139547),
TFR2(ENSG00000106327), RSAD2(ENSG00000134321), SLC30A10(ENSG00000196660), GHR(ENSG00000112964),
KCNJ8(ENSG00000121361), CYP2D6(ENSG00000100197), SLC2A2(ENSG00000163581), CYP2A7(ENSG00000198077),
CYP1A2(ENSG00000140505), CYP3A4(ENSG00000160868), CYP2C8(ENSG00000138115), CYP2C19(ENSG00000165841),
AIG1(ENSG00000146416), ASGR1(ENSG00000141505), ABCB11(ENSG00000073734), DCXR(ENSG00000169738),
CYP2C9(ENSG00000138109), ABCC2(ENSG00000023839), DPP4(ENSG00000197635), PODXL(ENSG00000128567),
PECAM1(ENSG00000261371), PLA2R1(ENSG00000153246), MAP6(ENSG00000171533), NPHS2(ENSG00000116218),
TNS2(ENSG00000111077), PTPRO(ENSG00000151490), EHD1(ENSG00000110047), CD34(ENSG00000174059),
ENG(ENSG00000106991), EHD3(ENSG00000013016), TRPM3(ENSG00000083067), VPS52(ENSG00000223501),
FCAMR(ENSG00000162897), SLC5A12(ENSG00000148942), SLC12A1(ENSG00000074803), SLC27A2(ENSG00000140284),
SLC6A19(ENSG00000174358), SLC22A11(ENSG00000168065), NFAM1(ENSG00000235568), PLLP(ENSG00000102934),
VHL(ENSG00000134086), PDZK1(ENSG00000174827), MGAT4B(ENSG00000161013), PROM2(ENSG00000155066),
NAT8(ENSG00000144035), UGT2B4(ENSG00000156096), SLC22A6(ENSG00000197901), TMEM72(ENSG00000187783),
SLC7A7(ENSG00000155465), UGT1A6(ENSG00000167165), TMEM174(ENSG00000164325), SLC28A1(ENSG00000156222),
RAB11FIP5(ENSG00000135631), SLC13A2(ENSG00000007216), SYT7(ENSG00000011347), SLC4A4(ENSG00000080493),
PKHD1(ENSG00000170927), ENPP6(ENSG00000164303), GGT1(ENSG00000100031), CUBN(ENSG00000107611),
HYAL2(ENSG00000068001), CDH6(ENSG00000113361), AQP6(ENSG00000086159), SLC7A9(ENSG00000021488),
FXYD2(ENSG00000137731), ACE(ENSG00000159640), AKAP10(ENSG00000108599), AQP3(ENSG00000165272),
CDH16(ENSG00000166589), INTS2(ENSG00000108506), MOXD1(ENSG00000079931), MC4R(ENSG00000166603),
LRP2(ENSG00000081479), OR10R2(ENSG00000198965), LRRK2(ENSG00000188906), NDST2(ENSG00000166507),
SLC27A6(ENSG00000113396), CD36(ENSG00000135218), RASL10B(ENSG00000270885), PARVB(ENSG00000188677),
PLN(ENSG00000198523), SGCG(ENSG00000102683), TMEM143(ENSG00000161558), PRRG2(ENSG00000126460),
DSP(ENSG00000096696), DSC2(ENSG00000134755), CAVIN4(ENSG00000170681), CHRNA1(ENSG00000138435),
CNTFR(ENSG00000122756), ARL4C(ENSG00000188042), MYZAP(ENSG00000263155), MSTO1(ENSG00000125459),
SLC16A10(ENSG00000112394), DES(ENSG00000175084), SLC5A5(ENSG00000105641), MPP7(ENSG00000150054),
TPO(ENSG00000115705), IFI27(ENSG00000165949), MUC15(ENSG00000169550), OLFM2(ENSG00000105088),
UNC13B(ENSG00000198722), IYD(ENSG00000009765), IL17RA(ENSG00000177663), SCGN(ENSG00000079689),
SCG3(ENSG00000104112), PTGDR2(ENSG00000183134), RAB3B(ENSG00000169213), PTPRN(ENSG00000054356),
MGAT4A(ENSG00000071073), SV2A(ENSG00000159164), YRDC(ENSG00000196449), TSPAN7(ENSG00000156298),
SLC30A8(ENSG00000164756), SYP(ENSG00000102003), PTPRN2(ENSG00000155093), DGCR2(ENSG00000070413),
GNAO1(ENSG00000087258), CASR(ENSG00000036828), ATP9A(ENSG00000054793), CADM1(ENSG00000182985),
TMEM97(ENSG00000109084), SGMS1(ENSG00000198964), SYCN(ENSG00000179751), CUZD1(ENSG00000138161),
GP2(ENSG00000169347), KIRREL2(ENSG00000126259), EVI2A(ENSG00000126860), AQP8(ENSG00000103375),
GPAT2(ENSG00000186281), LPAR6(ENSG00000139679), CFTR(ENSG00000001626), AQP12A(ENSG00000184945),
AQP12B(ENSG00000185176), UGT2A3(ENSG00000135220), CORO7(ENSG00000262246), PLEKHA3(ENSG00000116095),
UGT2B17(ENSG00000197888), SERAC1(ENSG00000122335), UGT2B28(ENSG00000135226), TMEM253(ENSG00000232070),
UGT2B15(ENSG00000196620), C2orf88(ENSG00000187699), FPR2(ENSG00000171049), HTR1A(ENSG00000178394),
CA12(ENSG00000074410), HSD3B7(ENSG00000099377), RPS6KC1(ENSG00000136643), SLC25A17(ENSG00000100372),
PSD4(ENSG00000125637), AOC3(ENSG00000131471), GLT8D2(ENSG00000120820), GBP2(ENSG00000162645),
AP3M1(ENSG00000185009), GJB4(ENSG00000189433), TNFSF12(ENSG00000239697), GBP2(ENSG00000162645),
SORD(ENSG00000140263), GATM(ENSG00000171766), GCHFR(ENSG00000137880), FMO3(ENSG00000007933),
ABCB4(ENSG00000005471), BCL2L10(ENSG00000137875), UGCG(ENSG00000148154), HSD11B1(ENSG00000117594),
KDR(ENSG00000128052), KIRREL1(ENSG00000183853), PTH2R(ENSG00000144407), MME(ENSG00000196549),
SNCA(ENSG00000145335), RYK(ENSG00000163785), SLC35B1(ENSG00000121073), CLSTN1(ENSG00000171603),
ENPEP(ENSG00000138792), ITGA8(ENSG00000077943), SLC34A3(ENSG00000198569), PALM(ENSG00000099864),
XPNPEP2(ENSG00000122121), SLC13A3(ENSG00000158296), ADCY7(ENSG00000121281), FAM151A(ENSG00000162391),
CHDH(ENSG00000016391), FAM210A(ENSG00000177150), L1CAM(ENSG00000198910), BSND(ENSG00000162399),
AQP1(ENSG00000240583), SMPD4(ENSG00000136699), CAP2(ENSG00000112186), GABARAPL2(ENSG00000034713),
TNFSF12(ENSG00000239697), SGCB(ENSG00000163069), BVES(ENSG00000112276), CKMT2(ENSG00000131730),
SLC2A4(ENSG00000181856), CPT1B(ENSG00000205560), COX7B(ENSG00000131174), MLIP(ENSG00000146147),
SHISAL2B(ENSG00000145642), CD99(ENSG00000002586), DIAPH1(ENSG00000131504), CADPS(ENSG00000163618),
FKBP2(ENSG00000173486), ATP8B2(ENSG00000143515), HRAS(ENSG00000174775), RHBDL2(ENSG00000158315),
KRAS(ENSG00000133703), NRAS(ENSG00000213281), STXBP3(ENSG00000116266), NECTIN1(ENSG00000110400),
SLC9A1(ENSG00000090020), SNTA1(ENSG00000101400), PCDH1(ENSG00000156453), RAB27A(ENSG00000069974),
EMC9(ENSG00000100908), AVEN(ENSG00000169857), B3GNT7(ENSG00000156966), MARCKSL1(ENSG00000175130),
GPER1(ENSG00000164850), HCN3(ENSG00000143630), MUC4(ENSG00000145113), NAPEPLD(ENSG00000161048),
GPC5(ENSG00000179399), LYPD3(ENSG00000124466), SRC(ENSG00000197122), PARD3B(ENSG00000116117),
LY6D(ENSG00000167656), FAM83B(ENSG00000168143), FRS3(ENSG00000137218), EPHA10(ENSG00000183317),
ORAI1(ENSG00000276045), NISCH(ENSG00000010322), MARCKSL1(ENSG00000175130), TMEM243(ENSG00000135185),
NECTIN1(ENSG00000110400), S100A9(ENSG00000163220), FAT2(ENSG00000086570), SLC25A20(ENSG00000178537),
GNPNAT1(ENSG00000100522), TM4SF4(ENSG00000169903), CYP4F3(ENSG00000186529), EPHX1(ENSG00000143819),
CYP4F11(ENSG00000171903), CYP2A6(ENSG00000255974), ATP5F1C(ENSG00000165629), CYP4F2(ENSG00000186115),
CYP2A13(ENSG00000197838), CYP2E1(ENSG00000130649), GIPC1(ENSG00000123159), ST3GAL6(ENSG00000064225),
IL17RE(ENSG00000163701), STRA6(ENSG00000137868), VPS26B(ENSG00000151502), MITD1(ENSG00000158411),
LRRC55(ENSG00000183908), PARD3B(ENSG00000116117), SLC23A1(ENSG00000170482), SLC7A8(ENSG00000092068),
FERMT1(ENSG00000101311), TMCC1(ENSG00000172765), PPM1L(ENSG00000163590), CYP2W1(ENSG00000073067),
FAM168B(ENSG00000152102), KPNA2(ENSG00000182481), IL17RC(ENSG00000163702), ATP2A2(ENSG00000174437),
NISCH(ENSG00000010322), MBTPS1(ENSG00000140943), LPCAT2(ENSG00000087253), KCNQ1(ENSG00000053918),
SLC8A1(ENSG00000183023), CDH5(ENSG00000179776), STX5(ENSG00000162236), SLC12A6(ENSG00000140199),
‘KCTD3(ENSG00000136636), TMEM60(ENSG00000135211), RNF144B(ENSG00000137393), ABCG8(ENSG00000143921),
HPS6(ENSG00000166189), CRK(ENSG00000167193), CYP2B6(ENSG00000197408), ANPEP(ENSG00000166825),
ILK(ENSG00000166333), AIF1L(ENSG00000126878), NIPAL4(ENSG00000172548), DYSF(ENSG00000135636),
SLC47A1(ENSG00000142494), ATP6V1D(ENSG00000100554), SLC16A14(ENSG00000163053), TMEM219(ENSG00000149932),
AKR1A1(ENSG00000117448), ATRAID(ENSG00000138085), CLIC4(ENSG00000169504), ANK2(ENSG00000145362),
MYORG(ENSG00000164976), PAM(ENSG00000145730), ENPP1(ENSG00000197594), RAB43(ENSG00000172780),
BCL2(ENSG00000171791), MXRA7(ENSG00000182534), BMPR1A(ENSG00000107779), ZDHHC2(ENSG00000104219),
SLC30A7(ENSG00000162695), SRI(ENSG00000075142), SLC26A2(ENSG00000155850), SFXN5(ENSG00000144040),
PIGR(ENSG00000162896), TULP3(ENSG00000078246), TJP3(ENSG00000105289), TCIRG1(ENSG00000110719),
RAP1GAP(ENSG00000076864), ABCC3(ENSG00000108846), GPR183(ENSG00000169508), SLC24A3(ENSG00000185052),
MGST2(ENSG00000085871), TNFAIP8L3(ENSG00000183578), VPS28(ENSG00000160948), TMEM201(ENSG00000188807),
TRPM4(ENSG00000130529), FCER1G(ENSG00000158869), CLN6(ENSG00000128973), GALNT16(ENSG00000100626),
ABCD3(ENSG00000117528), NBAS(ENSG00000151779), MFSD10(ENSG00000109736), VTI1B(ENSG00000100568),
TMEM164(ENSG00000157600), CYP20A1(ENSG00000119004), GALNT16(ENSG00000100626), MERTK(ENSG00000153208),
ELOVL1(ENSG00000066322), COL13A1(ENSG00000197467), PIGU(ENSG00000101464), GPC4(ENSG00000076716),
EVA1A(ENSG00000115363), FXYD6(ENSG00000137726), CDH2(ENSG00000170558), GK(ENSG00000198814),
ACER3(ENSG00000078124), PLPP1(ENSG00000067113), GJA4(ENSG00000187513), CACNA1C(ENSG00000151067),
TTC17(ENSG00000052841), ACY3(ENSG00000132744), RNF144A(ENSG00000151692), RDX(ENSG00000137710),
SEL1L3(ENSG00000091490), UCHL1(ENSG00000154277), SCARA3(ENSG00000168077), SLC3A1(ENSG00000138079),
TNFRSF14(ENSG00000157873), TMPRSS2(ENSG00000184012), IMMT(ENSG00000132305), ADCK2(ENSG00000133597),
SLC48A1(ENSG00000211584), TESC(ENSG00000088992), ELOVL1(ENSG00000066322), SLC37A4(ENSG00000137700),
TMEM63B(ENSG00000137216), MT-ND4(ENSG00000198886), NDUFS8(ENSG00000110717), SUSD6(ENSG00000100647),
SLC2A10(ENSG00000197496), APOOL(ENSG00000155008), ICA1(ENSG00000003147), TPCN1(ENSG00000186815),
ANKRD13A(ENSG00000076513), SERP1(ENSG00000120742), TNFSF14(ENSG00000125735), MERTK(ENSG00000153208),
FAR2(ENSG00000064763), SLC2A11(ENSG00000133460), PDLIM4(ENSG00000131435), TMEM43(ENSG00000170876),
CAV1(ENSG00000105974), MTMR2(ENSG00000087053), CLCA2(ENSG00000137975), ADGRA3(ENSG00000152990),
GJA1(ENSG00000152661), CAV1(ENSG00000105974), GAA(ENSG00000171298), ZDHHC6(ENSG00000023041),
VIPR2(ENSG00000106018), KCNJ1(ENSG00000151704), EFHD1(ENSG00000115468), GJA1(ENSG00000152661),
TRPV4(ENSG00000111199), TMEM263(ENSG00000151135), MARCKS(ENSG00000277443), AKAP12(ENSG00000131016),
PPP1R3A(ENSG00000154415), SNX1(ENSG00000028528), ICAM1(ENSG00000090339), SNX1(ENSG00000028528),
TMEM245(ENSG00000106771), CLEC2B(ENSG00000110852), MFN2(ENSG00000116688), GNAI1(ENSG00000127955),
TEX2(ENSG00000136478), SMPD2(ENSG00000135587), UTRN(ENSG00000152818), LRRC24(ENSG00000254402),
MGLL(ENSG00000074416), KCNMB3(ENSG00000171121), APOBR(ENSG00000184730), ATP8B1(ENSG00000081923),
MRAP(ENSG00000170262), PAG1(ENSG00000076641), APOBR(ENSG00000184730), SLC38A9(ENSG00000177058),
SPIRE1(ENSG00000134278), HHAT(ENSG00000054392), NPHS1(ENSG00000161270), VAT1(ENSG00000108828),
ITPR2(ENSG00000123104), DAB2(ENSG00000153071), ACVRL1(ENSG00000139567), TMEM37(ENSG00000171227),
LFNG(ENSG00000106003), NDUFB9(ENSG00000147684), PVR(ENSG00000073008), FXYD7(ENSG00000221946),
MFSD11(ENSG00000092931), FKBP11(ENSG00000134285), TMED6(ENSG00000157315), SLC38A5(ENSG00000017483),
SMAGP(ENSG00000170545), TMEM94(ENSG00000177728), PLXNA1(ENSG00000114554), SLC25A46(ENSG00000164209),
TFPI(ENSG00000003436), LYPLA1(ENSG00000120992), NUCB2(ENSG00000070081), VPS11(ENSG00000160695),
SIGIRR(ENSG00000185187), TECPR1(ENSG00000205356), VPS41(ENSG00000006715), CLMN(ENSG00000165959),
SLC25A13(ENSG00000004864), ANKRD46(ENSG00000186106), CDH26(ENSG00000124215), ADGRL1(ENSG00000072071),
RAB20(ENSG00000139832), C2CD2(ENSG00000157617), NAGPA(ENSG00000103174), KCNK1(ENSG00000135750),
TMEM159(ENSG00000011638), ATP6V1B1(ENSG00000116039), TRPV5(ENSG00000127412), CACNA1B(ENSG00000148408),
COQ2(ENSG00000173085), COX14(ENSG00000178449), SLC2A5(ENSG00000142583), CPM(ENSG00000135678),
SLC16A4(ENSG00000168679), VDAC3(ENSG00000078668), DOK7(ENSG00000175920), TSPAN3(ENSG00000140391),
HEG1(ENSG00000173706), HLA-DQB1(ENSG00000179344), NBEA(ENSG00000172915), VAMP1(ENSG00000139190),
SRPRB(ENSG00000144867), KIFC3(ENSG00000140859), TMEM106C(ENSG00000134291), TSNARE1(ENSG00000171045),
FAM162A(ENSG00000114023), PYCARD(ENSG00000103490), SDR16C5(ENSG00000170786), CAV2(ENSG00000105971),
PPP1R16B(ENSG00000101445), SDR16C5(ENSG00000170786), TSNARE1(ENSG00000171045), CAV2(ENSG00000105971),
PYCARD(ENSG00000103490), PLPPR2(ENSG00000105520), PRKN(ENSG00000185345), TOMM40L(ENSG00000158882),
TMX2(ENSG00000213593), MAP1LC3B(ENSG00000140941), PPP1R16B(ENSG00000101445), PLOD1(ENSG00000083444), SDCBP2(ENSG00000125775), GBA2(ENSG00000070610), EPB41L2(ENSG00000079819), FGFR2(ENSG00000066468),
RETSAT(ENSG00000042445)

### List of All Proteins in the List Above Separately Categorized by Applicable Use

[0548] (Ensembl version 92.38 ID for the symbols below can be found in the table above):
[0549] 1. Cancer treated: melanoma
   [0550] a. Tissue protected: Colon SELENBP1, SMIM24, RAB27B, MUC1, SDC1, TMEM45A, PEX10, CD46, TMEM236, VPS35L, TSPAN8, SYTL2, SLC28A3, PTAFR, PIGZ, SLC39A14, SLC6A15, RAB25, SLC20A2, SPTLC3, MARK2, CA2, CDHR5, CLDN4, DPEP1, ACSLS, CLCA1, DSG2, CEACAM5, EPCAM, BRI3, CLDN8, GAL3ST2, B3GNT8, ELOVL7, CLDN7, CDH17, ATP11C, C12orf66, HHLA2, MAOA, SLC9A3R2, SLC2A6, GPA33, MUC13,
   [0551] b. Tissue protected: Lung SLC22A15, SCEL, SMURF1, AGER, SLC6A15, RAB25, STEAP1, CCR7, CYB5A, FADS2, MAOA, LAMP3, SLC34A2,
   [0552] c. Tissue protected: Skin PERP, RAC1, MTMR2, TMEM134, PROM2, KRT1, STK16, GJB4, KCNJ8, DSP, DSC3, GSDMA, DSG1, ADGRF4, AQP3, FGFR3, PSKH1, SCEL, SLC41A2, ICAM3, S100A8, DSC2, FGFBP1, OR10R2,
   [0553] d. Tissue protected: Liver SELENBP1, SLCO1B3, SLC25A43, SLC27A5, RDH16, TFR2, RSAD2, SLC30A10, GHR, KCNJ8, CYP2D6, ACSLS, SLC2A2, CYP2A7, CYP1A2, CYP3A4, CYP2C8, CYP2C19, FADS2, AIG1, ASGR1, ABCB11, DCXR, CYP2C9, ABCC2, DPP4,
   [0554] e. Tissue protected: Kidney (glomeruli) PODXL, PECAM1, PLA2R1, MAP6, NPHS2, TNS2, PTPRO, EHD1, CD34, ENG, SLC9A3R2, EHD3,
   [0555] f. Tissue protected: Kidney (tubules) TRPM3, VPS52, FCAMR, SMIM24, SLC5A12, SLC12A1, SLC27A2, SLC6A19, SLC22A11, NFAM1, PLLP, VHL, RAB27B, PDZK1, SDC1, MGAT4B, PROM2, NAT8, UGT2B4, SLC22A6, TMEM72, SLC7A7, UGT1A6, TMEM174, SYTL2, SLC28A1, PTAFR, PIGZ, RAB25, RAB11FIP5, SLC13A2, SYT7, SLC4A4, MARK2, PKHD1, CA2, CDHR5, ENPP6, GGT1, DPEP1, CUBN, HYAL2, KCNJ8, ACSLS, CDH6, AQP6, CLDN8, CLDN7, SLC7A9, FXYD2, ACE, DCXR, AKAP10, AQP3, CDH16, INTS2, MAOA, MOXD1, MC4R, SLC2A6, LRP2, OR10R2, ABCC2, DPP4, LRRK2, NDST2,
   [0556] g. Tissue protected: Heart (cardiomyocytes) SLC27A6, CD36, RASL10B, SLC22A15, NFAM1, PARVB, PLN, SGCG, TMEM143, PRRG2, DSP, DSC2, CAVIN4, DSG2, CHRNA1, CNTFR, ARL4C, MYZAP, MSTO1, SLC16A10, OR10R2, DES,
   [0557] h. Tissue protected: Thyroid SELENBP1, SLC5A5, MPP7, TPO, IFI27, MUC15, OLFM2, UNC13B, RAB25, IYD, CLDN7, CDH16, MAOA, MSTO1, IL17RA,
   [0558] i. Tissue protected: Pancreatic endocrine cells (Islets) SCGN, SCG3, PTGDR2, RAB3B, PTPRN, MGAT4A, SV2A, YRDC, TSPAN7, SLC30A8, SYP, PTPRN2, RAB25, DGCR2, GNAO1, CASR, CLDN7, ATP9A, CADM1, MAOA,
   [0559] j. Tissue protected: Pancreatic exocrine cells VPS52, RASL10B, TMEM97, IFI27, SGMS1, OLFM2, YRDC, SYCN, RSAD2, RAB25, SLC20A2, SLC4A4, CLDN4, DPEP1, CUZD1, GP2, KIRREL2, EVI2A, AQP8, GPAT2, LPAR6, FADS2, CLDN8, ELOVL7, CLDN7, CFTR, FXYD2, MAOA, AQP12A, AQP12B, MOXD1, MC4R, IL17RA,
[0560] 2. Cancer treated: lung cancer
   [0561] a. Tissue protected: Colon UGT2A3, CORO7, SMIM24, PLEKHA3, TMEM45A, PEX10, UGT2B17, SERAC1, UGT2B28, TMEM253, UGT2B15, C2orf88, SLC39A14, CA2, DPEP1, CLCA1, FPR2, HTR1A, CA12, BRI3, GAL3ST2, ELOVL7, HSD3B7, SLC2A6, RPS6KC1,
   [0562] b. Tissue protected: Lung SLC25A17, AGER, PSD4, CCR7, AOC3, GLT8D2, GBP2, AP3M1,
   [0563] c. Tissue protected: Skin GJB4, DSP, GSDMA, PSKH1, TNFSF12, GBP2, OR10R2,
   [0564] d. Tissue protected: Liver SLCO1B3, SLC27A5, SORD, TFR2, CYP2D6, SLC2A2, CYP2A7, GLT8D2, GATM, CYP1A2, GCHFR, CYP3A4, FMO3, ABCB4, CYP2C8, CYP2C19, BCL2L10, UGCG, ASGR1, ABCB11, HSD11B1, CYP2C9, ABCC2,
   [0565] e. Tissue protected: Kidney (glomeruli) KDR, PODXL, KIRREL1, PECAM1, PLA2R1, PTH2R, MME, NPHS2, TNS2, SNCA, RYK, SLC35B1, CLSTN1, EHD1, CD34, GLT8D2, ENG, ENPEP, ITGA8, EHD3,
   [0566] f. Tissue protected: Kidney (tubules) TRPM3, FCAMR, SMIM24, SLC5A12, SLC12A1, SLC27A2, SLC6A19, SLC34A3, NAT8, PALM, MME, UGT2B4, SLC22A6, TMEM72, XPNPEP2, SLC7A7, SERAC1, TMEM174, SLC28A1, SLC13A3, RAB11FIP5, SLC13A2, SYT7, SLC4A4, PKHD1, CA2, ENPP6, GGT1, DPEP1, CUBN, HYAL2, ADCY7, FAM151A, CHDH, HTR1A, GLT8D2, GATM, FAM210A, CA12, L1CAM, BSND, BCL2L10, AQP6, AQP1, UGCG, ENPEP, SLC7A9, FXYD2, ACE, AKAP10, HSD3B7, CDH16, INTS2, SMPD4, SLC2A6, LRP2, OR10R2, ABCC2, LRRK2,
   [0567] g. Tissue protected: Heart (cardiomyocytes) CAP2, CD36, GABARAPL2, RASL10B, TNFSF12, SGCB, BVES, PLN, SGCG, SERAC1, CKMT2, DSP, CAVIN4, SLC2A4, GLT8D2, CHRNA1, GBP2, CPT1B, COX7B, MYZAP, MLIP, OR10R2, DES,
   [0568] h. Tissue protected: Thyroid SORD, IYD, CLSTN1, CDH16,
   [0569] i. Tissue protected: Pancreatic endocrine cells (Islets) SCGN, SCG3, PTGDR2, RAB3B, PTPRN, SHISAL2B, YRDC, TSPAN7, SLC30A8, PTPRN2, DGCR2, CASR, CD99, DIAPH1, GBP2, CADPS,
   [0570] j. Tissue protected: Pancreatic exocrine cells RASL10B, TMEM97, PLEKHA3, PTH2R, YRDC, SYCN, SLC4A4, DPEP1, CUZD1, KIRREL2, ADCY7, FKBP2, EVI2A, GATM, AQP8, DIAPH1, GPAT2, CA12, GBP2, AQP1, ELOVL7, CFTR, FXYD2, AQP12A, AQP12B,
[0571] 3. Cancer treated: renal cancer
   [0572] a. Tissue protected: Colon UGT2A3, ATP8B2, SMIM24, HRAS, RHBDL2, KRAS, TMEM45A, NRAS, STXBP3, PEX10, CD46, NECTIN1, SLC9A1, SNTA1, UGT2B17, TMEM236, VPS35L, UGT2B28, TMEM253, TSPAN8, UGT2B15, PCDH1, SLC28A3, RAB27A, PIGZ, CA2, DPEP1, EMC9, CLCA1, CEACAM5, BRI3, GAL3ST2, CDH17, AVEN, B3GNT7, SLC9A3R2, MARCKSL1, GPER1, HCN3, GPA33, RPS6KC1, MUC13, MUC4, NAPEPLD,
   [0573] b. Tissue protected: Lung NECTIN1, PSD4, STEAP1, CCR7, GPC5, LAMP3,
   [0574] c. Tissue protected: Skin PERP, RAC1, MTMR2, TMEM134, PROM2, LYPD3, KRT1, SRC, PARD3B, LY6D, FAM83B, GJB4, DSP, FRS3, DSC3, GSDMA, EPHA10, DSG1, ORAI1, NISCH, MARCKSL1, FGFR3, TMEM243, SLC41A2, ICAM3, NECTIN1, S100A9, FAT2, FGFBP1, OR10R2,
   [0575] d. Tissue protected: Liver SLCO1B3, SLC27A5, SLC25A20, RDH16, GNPNAT1, SORD, TFR2, TM4SF4, SLC30A10, CYP2D6, CYP4F3, CYP2A7, EPHX1, CYP4F11, CYP1A2, CYP3A4, CYP2A6, CYP2C8, CYP2C19, ATP5F1C, CYP4F2, ASGR1, ABCB11, CYP2A13, CYP2E1, DCXR, HSD11B1, CYP2C9, GIPC1, ABCC2,
   [0576] e. Tissue protected: Kidney (glomeruli) ST3GAL6, KDR, PODXL, PECAM1, PLA2R1, PTH2R, MAP6, NPHS2, TNS2, SNCA, PTPRO, EHD1, CD34, ENG, SLC9A3R2, IL17RE, ITGA8, EHD3,
   [0577] f. Tissue protected: Kidney (tubules) TRPM3, STRA6, SMIM24, SLC12A1, SLC34A3, VPS26B, MGAT4B, MITD1, LRRC55, PROM2, PALM, SLC7A7, TMEM174, PARD3B, PIGZ, SLC13A2, SLC4A4, SLC23A1, PKHD1, CA2, ENPP6, DPEP1, ADCY7, FAM210A, SLC7A8, BSND, AQP6, ATP5F1C, CYP4F2, FERMT1, ACE, DCXR, SMPD4, GIPC1, OR10R2, ABCC2, NAPEPLD,
   [0578] g. Tissue protected: Heart (cardiomyocytes) TMCC1, CD36, RASL10B, PARVB, PLN, SGCG, TMEM143, PPM1L, CYP2W1, DSP, CAVIN4, SLC2A4, FAM168B, CHRNA1, KPNA2, IL17RC, ATP2A2, CPT1B, COX7B, ARL4C, NISCH, MYZAP, MBTPS1, MLIP, OR10R2, DES,
   [0579] h. Tissue protected: Thyroid LPCAT2, MPP7, TPO, IFI27, MUC15, OLFM2, LRRC55, KCNQ1, SLC8A1, SORD, IYD, EMC9, CYP2W1, IL17RC, GIPC1, MARCKSL1, IL17RA,
   [0580] i. Tissue protected: Pancreatic endocrine cells (Islets) SCG3, PTGDR2, RAB3B, PTPRN, SV2A, YRDC, TSPAN7, SLC30A8, SYP, PTPRN2, DGCR2, CYP2W1, GNAO1, CASR, CD99, CDH5, CADPS,
   [0581] j. Tissue protected: Pancreatic exocrine cells RASL10B, TMEM97, STX5, IFI27, STXBP3, MITD1, GNPNAT1, PTH2R, OLFM2, NECTIN1, YRDC, SYCN, SLC12A6, SLC4A4, DPEP1, EMC9, GP2, KCTD3, ADCY7, EVI2A, AQP8, GPAT2, CFTR, AVEN, AQP12A, AQP12B, IL17RA,
[0582] 4. Cancer treated: urothelial cancer
   [0583] a. Tissue protected: Colon UGT2A3, TMEM60, SMIM24, RNF144B, STXBP3, PEX10, UGT2B17, TMEM236, UGT2B28, TMEM253, UGT2B15, RAB27A, CA2, DPEP1, CLCA1, FPR2, HTR1A, ABCG8, GAL3ST2, B3GNT8, ELOVL7, CDH17, C12orf66, GPA33, RPS6KC1, MUC13, HPS6,
   [0584] b. Tissue protected: Lung SLC22A15, SLC25A17, PSD4, STEAP1, CCR7, AOC3, LAMP3,
   [0585] c. Tissue protected: Skin PERP, DSG1, OR10R2,
   [0586] d. Tissue protected: Liver SLCO1B3, SLC27A5, RNF144B, TFR2, TM4SF4, CRK, CYP2D6, SLC2A2, CYP2A7, CYP1A2, CYP3A4, CYP2A6, CYP2B6, FMO3, CYP2C8, CYP2C19, BCL2L10, ANPEP, ASGR1, CYP2A13, HSD11B1, CYP2C9, HPS6, ABCC2, DPP4,
   [0587] e. Tissue protected: Kidney (glomeruli) ILK, KIRREL1, PLA2R1, PTH2R, MAP6, NPHS2, TNS2, SNCA, PTPRO, EHD1, AIF1L, CD34, ENG, ITGA8, EHD3, NIPAL4, HPS6, DYSF,
   [0588] f. Tissue protected: Kidney (tubules) TRPM3, STRA6, SLC47A1, SMIM24, SLC5A12, SLC12A1, SLC27A2, SLC34A3, VPS26B, RNF144B, MITD1, NAT8, UGT2B4, ATP6V1D, SLC22A6, TMEM72, SLC7A7, SLC16A14, TMEM174, SLC28A1, SLC13A3, SLC13A2, SLC4A4, PKHD1, TMEM219, CRK, CA2, GGT1, DPEP1, CUBN, AIF1L, CDH6, FAM151A, CHDH, HTR1A, AKR1A1, ATRAID, CLIC4, BCL2L10, AQP1, ANK2, ANPEP, SLC7A9, FXYD2, ACE, CDH16, INTS2, LRP2, HPS6, OR10R2, ABCC2, DPP4, LRRK2,
   [0589] g. Tissue protected: Heart (cardiomyocytes) CD36, SLC22A15, BVES, PARVB, PLN, SGCG, MYORG, PRRG2, CKMT2, CYP2W1, CAVIN4, CHRNA1, CPT1B, PAM, MYZAP, OR10R2, DES,
   [0590] h. Tissue protected: Thyroid ENPP1, TPO, IFI27, SLC16A14, UNC13B, RAB43, IYD, CYP2W1, ABCG8, BCL2, CDH16,
   [0591] i. Tissue protected: Pancreatic endocrine cells (Islets) SCGN, SCG3, RAB3B, MXRA7, PTPRN, SHISAL2B, SV2A, YRDC, TSPAN7, SLC30A8, PTPRN2, DGCR2, CYP2W1, GNAO1, CADPS, CADM1,
   [0592] j. Tissue protected: Pancreatic exocrine cells IFI27, STXBP3, MITD1, PTH2R, YRDC, SYCN, SLC4A4, DPEP1, CUZD1, GP2, KIRREL2, BMPR1A, FKBP2, GPAT2, AQP1, ELOVL7, ANPEP, CFTR, FXYD2, AQP12A, AQP12B, HPS6,
[0593] 5. Cancer treated: head and neck cancer
   [0594] a. Tissue protected: Colon ZDHHC2, SLC30A7, UGT2A3, ATP8B2, CORO7, SMIM24, SRI, SLC26A2, SFXN5, PIGR, PLEKHA3, TULP3, TJP3, TCIRG1, RAP1GAP, TMEM45A, PEX10, ABCC3, CD46, GPR183, SLC24A3, MGST2, TNFAIP8L3, UGT2B17, TMEM236, VPS28, VPS35L, UGT2B28, TMEM253, TSPAN8, SYTL2, TMEM201, UGT2B15, PCDH1, SLC28A3, PTAFR, RAB27A, PIGZ, SLC39A14, SLC6A15, TRPM4, CA2, CDHR5, DPEP1, FCER1G, ACSL5, CLCA1, FPR2, HTR1A, CLN6, GALNT16, BRI3, B3GNT8, ELOVL7, CDH17, ATP11C, B3GNT7, HSD3B7, ABCD3, HHLA2, SLC9A3R2, NBAS, SLC2A6, GPA33, MUC13, HPS6, MUC4,
   [0595] b. Tissue protected: Lung AGER, MFSD10, PSD4, SLC6A15, VTI1B, TMEM164, STEAP1, CYB5A, AOC3, AP3M1, CYP20A1, ABCD3, LAMP3, SLC34A2,
   [0596] c. Tissue protected: Skin PERP, GSDMA, GALNT16, ADGRF4, PSKH1, TMEM243, ICAM3, MERTK, FAT2, ELOVL1, FGFBP1, COL13A1, OR10R2,
   [0597] d. Tissue protected: Liver SLCO1B3, SLC25A43, SLC27A5, PIGU, RDH16, MGST2, SORD, TFR2, TMEM201, GPC4, EVA1A, GHR, CYP2D6, ACSL5, SLC2A2, CYP2A7, CYP1A2, FXYD6, CYP3A4, CYP2A6, FMO3, ABCB4, CYP2C8, CDH2, CYP2C19, AIG1, UGCG, ANPEP, ASGR1, ABCB11, CYP2A13, CYP2E1, HSD11B1, ABCD3, CYP2C9, NBAS, GIPC1, GK, HPS6, ABCC2,
   [0598] e. Tissue protected: Kidney (glomeruli) ACER3, ST3GAL6, PLPP1, PECAM1, PLA2R1, PTH2R, MAP6, NPHS2, TNS2, PTPRO, SLC35B1, AIF1L, CD34, ENG, GJA4, ENPEP, CACNA1C, SLC9A3R2, ITGA8, NIPAL4, HPS6, DYSF,
   [0599] f. Tissue protected: Kidney (tubules) TRPM3, TTC17, ACY3, FCAMR, SLC47A1, SMIM24, SLC5A12, SLC12A1, RNF144A, RDX, SLC6A19, SLC22A11, SLC34A3, PIGR, VPS26B, PIGU, PDZK1, SEL1L3, UCHL1, SCARA3, GPR183, LRRC55, NAT8, SLC24A3, UGT2B4, ATP6V1D, SLC22A6, TMEM72, TNFAIP8L3, XPNPEP2, SLC3A1, SLC7A7, UGT1A6, TMEM174, TNFRSF14, SYTL2, TMPRSS2, SLC28A1, PTAFR, SLC13A3, PIGZ, SLC13A2, VTI1B, SLC4A4, PKHD1, IMMT, TMEM219, ADCK2, CA2, CDHR5, ENPP6, GGT1, DPEP1, CUBN, GPC4, HYAL2, SLC48A1, AIF1L, ACSLS, CDH6, FAM151A, CHDH, HTR1A, TESC, CLN6, ATRAID, FXYD6, CLIC4, FAM210A, ELOVL1, SLC37A4, CDH2, BSND, AQP6, AQP1, UGCG, ANK2, ANPEP, ENPEP, SLC7A9, FXYD2, ACE, TMEM63B, HSD3B7, CDH16, ABCD3, INTS2, SMPD4, MOXD1, NBAS, GIPC1, MC4R, SLC2A6, LRP2, HPS6, MT-ND4, OR10R2, ABCC2, LRRK2,
   [0600] g. Tissue protected: Heart (cardiomyocytes) SLC27A6, CAP2, GABARAPL2, RASL10B, RNF144A, SFXN5, SGCB, NDUFS8, BVES, PARVB, PLN, RAP1GAP, SGCG, GPR183, TMEM143, SUSD6, VTI1B, TMEM164, PPM1L, IMMT, CKMT2, CYP2W1, CAVIN4, SLC2A4, CHRNA1, CNTFR, CDH2, CPT1B, PAM, ABCD3, MYZAP, NBAS, SLC2A10, MLIP, APOOL, SLC16A10, ICA1, OR10R2, DES,
   [0601] h. Tissue protected: Thyroid SFXN5, TPO, TPCN1, TCIRG1, RAP1GAP, IFI27, LRRC55, SLC24A3, SORD, VTI1B, IYD, GPC4, CYP2W1, ANKRD13A, BCL2, CYP20A1, CDH16, NBAS, GIPC1, IL17RA,
   [0602] i. Tissue protected: Pancreatic endocrine cells (Islets) ZDHHC2, TTC17, SCGN, SCG3, PTGDR2, RAB3B, UCHL1, SERP1, PTPRN, MGAT4A, SHISAL2B, SV2A, YRDC, TSPAN7, SLC30A8, SYP, PTPRN2, VTI1B, DGCR2, CYP2W1, GNAO1, CASR, CD99, ATP9A, CADM1,
   [0603] j. Tissue protected: Pancreatic exocrine cells TNFSF14, RASL10B, SFXN5, TMEM97, PLEKHA3, RAP1GAP, IFI27, PTH2R, MERTK, YRDC, SYCN, VTI1B, SLC4A4, DPEP1, CUZD1, GPC4, GP2, KIRREL2, FAR2, TESC, AQP8, GPAT2, LPAR6, AQP1, ELOVL7, ANPEP, CFTR, FXYD2, CYP20A1, AQP12A, AQP12B, MOXD1, NBAS, MC4R, APOOL, IL17RA, HPS6, SLC2A11, PDLIM4,
[0604] 6. Cancer treated: colorectal cancer
   [0605] a. Tissue protected: Colon RAB27B, TMEM253, CA2, SLC9A3R2,
   [0606] b. Tissue protected: Lung SLC22A15, SLC25A17, AGER, TMEM43, PSD4, STEAP1, CCR7, CYB5A, GPC5, AOC3, CAV1, LAMP3, SLC34A2,
   [0607] c. Tissue protected: Skin MTMR2, LYPD3, KRT1, CLCA2, GJB4, ADGRA3, GJA1, GSDMA, DSG1, ADGRF4, CAV1, TMEM243, MTMR2, FAT2, OR10R2,
   [0608] d. Tissue protected: Liver SLCO1B3, SLC27A5, RDH16, TFR2, EVA1A, CYP2D6, SLC2A2, CYP2A7, GATM, EPHX1, CYP1A2, CYP3A4, CYP2A6, CYP2B6, FMO3, CYP2C8, CDH2, CYP2C19, BCL2L10, AIG1, ANPEP, ASGR1, ABCB11, CYP2A13, DCXR, CYP2C9, GK, GAA,
   [0609] e. Tissue protected: Kidney (glomeruli) ZDHHC6, ACER3, ST3GAL6, VIPR2, KDR, PODXL, KIRREL1, PECAM1, PLA2R1, PTH2R, NPHS2, TNS2, SNCA, RYK, PTPRO, SLC35B1, EHD1, AIF1L, CD34, ENG, SLC9A3R2, ITGA8, EHD3, DYSF,
   [0610] f. Tissue protected: Kidney (tubules) TRPM3, SLC5A12, SLC12A1, RNF144A, SLC27A2, SLC6A19, SLC34A3, RAB27B, KCNJ1, UCHL1, LRRC55, NAT8, UGT2B4, ATP6V1D, SLC22A6, TMEM72, SLC7A7, TMEM174, SLC28A1, SLC13A2, SLC4A4, SLC23A1, CA2, ENPP6, EFHD1, CUBN, AIF1L, CDH6, FAM151A, GATM, ATRAID, CLIC4, FAM210A, CDH2, BSND, BCL2L10, ANPEP, FXYD2, ACE, TMEM63B, DCXR, CDH16, LRP2, OR10R2, LRRK2,
   [0611] g. Tissue protected: Heart (cardiomyocytes) SLC27A6, CAP2, CD36, RASL10B, SLC22A15, RNF144A, SGCB, BVES, PLN, SGCG, PRRG2, FAM168B, CHRNA1, GJA1, CDH2, CPT1B, COX7B, MYZAP, OR10R2, DES,
   [0612] h. Tissue protected: Thyroid ZDHHC6, ENPP1, TPO, LRRC55, IYD, CDH16, GAA,
   [0613] i. Tissue protected: Pancreatic endocrine cells (Islets) SCGN, TRPV4, SCG3, PTGDR2, RAB3B, UCHL1, PTPRN, SV2A, YRDC, TSPAN7, SLC30A8, SYP, DGCR2, GNAO1, CASR, CD99, CADPS,
   [0614] j. Tissue protected: Pancreatic exocrine cells RASL10B, TMEM263, TMEM97, PTH2R, YRDC, SYCN, SLC4A4, CUZD1, KIRREL2, GATM, GPAT2, ANPEP, FXYD2, AQP12A, AQP12B, SLC2A11, GAA,
[0615] 7. Cancer treated: liver cancer
   [0616] a. Tissue protected: Colon ZDHHC2, SLC26A2, RAB27A, DPEP1, CLCA1, EPCAM, GAL3ST2, C12orf66, MARCKS, MUC13,
   [0617] b. Tissue protected: Lung SLC22A15, PSD4, STEAP1, CCR7, GPC5, LAMP3,
   [0618] c. Tissue protected: Skin PERP, MTMR2, LYPD3, CLCA2, DSP, GSDMA, DSG1, AQP3, TMEM243, S100A8, FAT2, OR10R2,
   [0619] d. Tissue protected: Liver SLCO1B3,
   [0620] e. Tissue protected: Kidney (glomeruli) ZDHHC6, ACER3, KDR, PODXL, PLA2R1, PTH2R, MAP6, NPHS2, SNCA, PTPRO, EHD1, AIF1L, CD34, ENG, AKAP12, CACNA1C, ITGA8, EHD3,
   [0621] f. Tissue protected: Kidney (tubules) SLC5A12, SLC12A1, SLC34A3, UCHL1, MGAT4B, LRRC55, SLC22A6, TMEM72, SLC3A1, TMEM174, SLC28A1, SLC13A2, SLC4A4, ENPP6, DPEP1, CUBN, AIF1L, ADCY7, CDH6, CLIC4, BSND, AQP6, ANK2, SLC7A9, ACE, AQP3, CDH16, MC4R, MARCKS, LRP2, OR10R2, NDST2,
   [0622] g. Tissue protected: Heart (cardiomyocytes) RASL10B, SLC22A15, SGCB, PLN, SGCG, PPP1R3A, DSP, SLC2A4, FAM168B, CHRNA1, CPT1B, PAM, MYZAP, MLIP, SLC16A10, OR10R2, DES,
   [0623] h. Tissue protected: Thyroid ZDHHC6, SLC5A5, TPO, LRRC55, SLC8A1, UNC13B, IYD, ANKRD13A, CDH16,
   [0624] i. Tissue protected: Pancreatic endocrine cells (Islets) ZDHHC2, SCGN, SCG3, RAB3B, UCHL1, MXRA7, PTPRN, SV2A, YRDC, TSPAN7, SLC30A8, SYP, PTPRN2, DGCR2, GNAO1, CASR, CADPS,
   [0625] j. Tissue protected: Pancreatic exocrine cells RASL10B, TMEM97, STX5, PTH2R, YRDC, SYCN, SLC4A4, DPEP1, CUZD1, KIRREL2, ADCY7, EVI2A, GPAT2, AQP12A, AQP12B, MC4R,
[0626] 8. Cancer treated: stomach cancer
   [0627] a. Tissue protected: Colon UGT2A3, SLC26A2, SNX1, UGT2B17, TMEM236, UGT2B28, UGT2B15, CLCA1, HTR1A, ABCG8, GAL3ST2, SLC9A3R2,
   [0628] b. Tissue protected: Lung SLC22A15, SLC25A17, AGER, PSD4, CCR7, AOC3, GBP2, CAV1, LAMP3, SLC34A2, ICAM1,
   [0629] c. Tissue protected: Skin PERP, MTMR2, TMEM134, LYPD3, KRT1, CLCA2, DSC3, DSG1, ADGRF4, CAV1, ORAI1, FGFR3, TMEM243, SNX1, ICAM3, S100A8, FAT2, GBP2, OR10R2,
   [0630] d. Tissue protected: Liver SLCO1B3, SLC27A5, PIGU, RDH16, SORD, TFR2, CYP2D6, SLC2A2, CYP2A7, EPHX1, CYP1A2, CYP3A4, CYP2A6, FMO3, ABCB4, CYP2C8, CDH2, CYP2C19, BCL2L10, AIG1, ASGR1, ABCB11, CYP2A13, HSD11B1, CYP2C9, ABCC2, GAA,
   [0631] e. Tissue protected: Kidney (glomeruli) TMEM245, KDR, KIRREL1, PLA2R1, PTH2R, MAP6, NPHS2, TNS2, SNCA, PTPRO, SLC35B1, EHD1, CD34, ENG, CLEC2B, CACNA1C, SLC9A3R2, ITGA8, EHD3, ICAM1, DYSF,
   [0632] f. Tissue protected: Kidney (tubules) TRPM3, STRA6, SLC5A12, SLC12A1, RNF144A, SLC27A2, RDX, SLC6A19, SLC34A3, PIGU, PDZK1, KCNJ1, UCHL1, MGAT4B, LRRC55, NAT8, PALM, MFN2, UGT2B4, ATP6V1D, SLC22A6, TMEM72, XPNPEP2, SLC3A1, TMEM174, SLC28A1, SLC13A2, SYT7, SLC4A4, ENPP6, GGT1, GNAI1, CUBN, ADCY7, HTR1A, ATRAID, CLIC4, FAM210A, CDH2, BSND, BCL2L10, AQP6, ANK2, SLC7A9, FXYD2, ACE, TMEM63B, CDH16, INTS2, LRP2, OR10R2, ABCC2, LRRK2,
   [0633] g. Tissue protected: Heart (cardiomyocytes) SLC27A6, CAP2, CD36, SLC22A15, TEX2, RNF144A, SGCB, BVES, PLN, SGCG, SMPD2, CKMT2, CYP2W1, CAVIN4, SLC2A4, CHRNA1, GBP2, CDH2, CLEC2B, ATP2A2, CPT1B, COX7B, MYZAP, MLIP, OR10R2, DES,
   [0634] h. Tissue protected: Thyroid TMEM245, TPO, LRRC55, SORD, UTRN, IYD, CYP2W1, ANKRD13A, ABCG8, BCL2, CDH16, GAA,
   [0635] i. Tissue protected: Pancreatic endocrine cells (Islets) SCGN, TRPV4, SCG3, PTGDR2, RAB3B, UCHL1, SMPD2, PTPRN, SV2A, YRDC, TSPAN7, SLC30A8, SYP, DGCR2, CYP2W1, GNAO1, CASR, CD99, GBP2, LRRC24,
   [0636] j. Tissue protected: Pancreatic exocrine cells TEX2, TMEM97, PTH2R, YRDC, SYCN, SLC4A4, CUZD1, KIRREL2, ADCY7, FKBP2, EVI2A, GPAT2, GBP2, CFTR, FXYD2, SLC2A11, GAA,
[0637] 9. Cancer treated: cervical cancer
   [0638] a. Tissue protected: Colon SMIM24, RNF144B, PEX10, MGLL, TMEM236, C2orf88, RAB27A, PIGZ, DPEP1, KCNMB3, FCER1G, CLCA1, CLN6, GAL3ST2, APOBR, ATP8B1, SLC9A3R2, GPA33, RPS6KC1, MUC13, MRAP,
   [0639] b. Tissue protected: Lung SLC22A15, SLC25A17, AGER, PAG1, PSD4, VTI1B, STEAP1, CCR7, CYB5A, AOC3, AP3M1, LAMP3, SLC34A2,
   [0640] c. Tissue protected: Skin GJB4, DSP, ADGRA3, GSDMA, DSG1, APOBR, FAT2, OR10R2,
   [0641] d. Tissue protected: Liver SLC38A9, SLCO1B3, SPIRE1, SLC27A5, SLC25A20, RNF144B, RDH16, TFR2, EVA1A, CYP2D6, SLC2A2, CYP2A7, CYP1A2, FXYD6, CYP3A4, CYP2A6, HHAT, ABCB4, CYP2C8, CDH2, CYP2C19, BCL2L10, ANPEP, ASGR1, ABCB11, CYP2A13, HSD11B1, CYP2C9, GK, ABCC2, DPP4,
   [0642] e. Tissue protected: Kidney (glomeruli) ACER3, KIRREL1, PLA2R1, PTH2R, MME, NPHS2, TNS2, SNCA, PTPRO, ENG, ENPEP, CACNA1C, SLC9A3R2, ITGA8, NPHS1, DYSF,
   [0643] f. Tissue protected: Kidney (tubules) TRPM3, FCAMR, SLC47A1, SMIM24, SLC5A12, SLC12A1, RNF144A, SLC27A2, SPIRE1, SLC6A19, SLC34A3, VAT1, VHL, RNF144B, SEL1L3, UCHL1, ITPR2, NAT8, MME, UGT2B4, ATP6V1D, SLC22A6, TMEM72, XPNPEP2, SLC3A1, SLC7A7, TMEM174, TMPRSS2, SLC28A1, PIGZ, SLC13A2, VTI1B, SLC4A4, ENPP6, EFHD1, GGT1, DPEP1, CUBN, HYAL2, KCNMB3, SLC48A1, DAB2, CLN6, FXYD6, CLIC4, HHAT, CDH2, BSND, BCL2L10, AQP6, AQP1, ANPEP, ENPEP, SLC7A9, FXYD2, ACE, TMEM63B, ACVRL1, TMEM37, INTS2, LFNG, LRP2, MRAP, MT-ND4, OR10R2, NDUFB9, ABCC2, DPP4, LRRK2, NDST2,
   [0644] g. Tissue protected: Heart (cardiomyocytes) GABARAPL2, RASL10B, SLC22A15, RNF144A, SGCB, BVES, PLN, PVR, SGCG, PPP1R3A, VTI1B, CKMT2, DSP, CAVIN4, CHRNA1, FXYD7, CDH2, CPT1B, ARL4C, ATP8B1, PAM, MYZAP, MRAP, OR10R2, NDUFB9, DES,
   [0645] h. Tissue protected: Thyroid ENPP1, TPO, TPCN1, MFSD11, VTI1B, IYD, IL17RA,
   [0646] i. Tissue protected: Pancreatic endocrine cells (Islets) SCGN, SCG3, VAT1, RAB3B, UCHL1, MXRA7, PTPRN, SV2A, TSPAN7, SLC30A8, SYP, PTPRN2, VTI1B, DGCR2, GNAO1, CASR, CD99, FKBP11, ATP9A, CADPS, LRRC24,
   [0647] j. Tissue protected: Pancreatic exocrine cells TMED6, RASL10B, SPIRE1, TMEM97, STX5, PTH2R, SYCN, VTI1B, SLC38A5, SLC4A4, DPEP1, CUZD1, GP2, KIRREL2, EVI2A, GPAT2, FKBP11, AQP1, ANPEP, CFTR, FXYD2, AQP12A, AQP12B, IL17RA, MRAP,
[0648] 10. Cancer treated: skin cancer
   [0649] a. Tissue protected: Colon SMAGP, ATP8B2, CORO7, SELENBP1, SMIM24, TMEM94, PLXNA1, SLC25A46, PIGR, PLEKHA3, TULP3, TFPI, TJP3, RAB27B, PEX10, CD46, LYPLA1, NUCB2, TNFAIP8L3, VPS11, SIGIRR, VPS28, VPS35L, SYTL2, SLC28A3, RAB27A, PIGZ, SLC6A15, TECPR1, VPS41, CDHR5, DPEP1, KCNMB3, FCER1G, ACSL5, CLCA1, FPR2, HTR1A, CLN6, CLMN, CA12, BRI3, GAL3ST2, B3GNT8, ELOVL7, APOBR, SLC25A13, CDH17, ANKRD46, CDH26, C12orf66, SLC9A3R2, SLC2A6, GPA33, MUC13, HPS6,
   [0650] b. Tissue protected: Lung SLC22A15, AGER, PAG1, SLC6A15, VTI1B, STEAP1, CCR7, CYB5A, AOC3, AP3M1, ADGRL1, LAMP3, SLC34A2,
   [0651] c. Tissue protected: Skin DSP, APOBR, PSKH1, ELOVL1, OR10R2,
   [0652] d. Tissue protected: Liver SELENBP1, TMEM94, SLCO1B3, SLC25A43, SLC27A5, RAB20, PIGU, SIGIRR, TM4SF4, EVA1A, GHR, CYP2D6, ACSL5, SLC2A2, CYP2A7, GATM, EPHX1, CYP1A2, FXYD6, CYP3A4, CYP2A6, CYP2B6, FMO3, HHAT, CYP2C8, CDH2, CYP2C19, BCL2L10, SLC25A13, ANPEP, ASGR1, ABCB11, CYP2A13, CYP2E1, GIPC1, GK, HPS6, ABCC2, DPP4,
   [0653] e. Tissue protected: Kidney (glomeruli) PODXL, KIRREL1, PLA2R1, PTH2R, MAP6, NPHS2, TNS2, SNCA, PTPRO, SLC35B1, EHD1, CD34, ENG, AKAP12, CACNA1C, SLC9A3R2, ITGA8, EHD3, NIPAL4, NPHS1, HPS6, DYSF,
   [0654] f. Tissue protected: Kidney (tubules) TRPM3, C2CD2, ACY3, FCAMR, SLC47A1, SMIM24, SLC5A12, TMEM94, SLC12A1, RNF144A, SLC27A2, SLC6A19, SLC22A11, SLC34A3, NAGPA, PIGR, PLLP, TFPI, VHL, RAB27B, PIGU, UCHL1, MGAT4B, MITD1, KCNK1, NAT8, TMEM159, UGT2B4, ATP6V1B1, SLC22A6, TMEM72, TNFAIP8L3, SLC3A1, SLC7A7, TMEM174, SYTL2, TMPRSS2, SLC28A1, SLC13A3, PIGZ, RAB11FIP5, SLC13A2, VTI1B, SYT7, SLC4A4, PKHD1, IMMT, TRPV5, VPS41, ADCK2, CDHR5, ENPP6, GGT1, DPEP1, CUBN, HYAL2, KCNMB3, SLC48A1, ACSL5, CACNA1B, CHDH, HTR1A, CLN6, GATM, ATRAID, FXYD6, CLMN, COQ2, COX14, ELOVL1, CA12, HHAT, CDH2, SLC2A5, BSND, BCL2L10, AQP6, SLC25A13, ANK2, ANPEP, SLC7A9, CPM, FXYD2, ACE, ADGRL1, TMEM63B, ACVRL1, CDH16, INTS2, SMPD4, MOXD1, LFNG, GIPC1, MC4R, SLC2A6, LRP2, HPS6, OR10R2, SLC16A4, NDUFB9, ABCC2, DPP4, LRRK2, NDST2,
   [0655] g. Tissue protected: Heart (cardiomyocytes) VDAC3, SLC27A6, CAP2, GABARAPL2, SLC22A15, RNF144A, SGCB, BVES, RAB20, SGCG, MYORG, TMEM143, SUSD6, VTI1B, PPM1L, TECPR1, IMMT, CKMT2, CYP2W1, DSP, DOK7, CAVIN4, SLC2A4, CHRNA1, CNTFR, CDH2, CPT1B, COX7B, ARL4C, MYZAP, MSTO1, MLIP, SLC16A10, ICA1, OR10R2, NDUFB9, DES,
   [0656] h. Tissue protected: Thyroid TSPAN3, SELENBP1, ENPP1, SLC25A46, TPO, TPCN1, IFI27, HEG1, KCNQ1, MFSD11, UTRN, UNC13B, VTI1B, VPS41, IYD, CYP2W1, HLA-DQB1, COQ2, CDH16, GIPC1, MSTO1,
   [0657] i. Tissue protected: Pancreatic endocrine cells (Islets) TSPAN3, SCGN, SCG3, NBEA, PTGDR2, UCHL1, SERP1, PTPRN, MGAT4A, SHISAL2B, SV2A, YRDC, TSPAN7, SLC30A8, SYP, PTPRN2, VTI1B, DGCR2, CYP2W1, GNAO1, CASR, CD99, DIAPH1, FKBP11, ATP9A, CADPS, CADM1, LRRC24,
   [0658] j. Tissue protected: Pancreatic exocrine cells TNFSF14, C2CD2, TMEM263, TMEM97, PLEKHA3, STX5, IFI27, MITD1, PTH2R, VPS11, YRDC, VAMP1, SYCN, VTI1B, SLC4A4, SRPRB, DPEP1, CUZD1, GP2, KIFC3, KIRREL2, FKBP2, EVI2A, GATM, AQP8, DIAPH1, GPAT2, FKBP11, CA12, ELOVL7, ANPEP, CFTR, FXYD2, ADGRL1, AQP12A, AQP12B, MOXD1, MC4R, HPS6, PDLIM4,
[0659] 11. Cancer treated: endometrial cancer
   [0660] a. Tissue protected: Colon UGT2A3, TMEM60, SMIM24, TMEM45A, UGT2B17, TMEM106C, VPS35L, UGT2B28, TMEM253, SYTL2, UGT2B 15, PIGZ, SLC39A14, SLC6A15, TSNARE1, CDHR5, DPEP1, EMC9, CLCA1, FPR2, CLN6, BRI3, GAL3ST2, B3GNT8, FAM162A, CDH17, C12orf66, HSD3B7, PYCARD, GPA33, MUC13,
   [0661] b. Tissue protected: Lung SLC22A15, SLC25A17, AGER, SDR16C5, PSD4, SLC6A15, STEAP1, CCR7, CYB5A, GPCS, AOC3, CAV1, CAV2, LAMP3,
   [0662] c. Tissue protected: Skin PERP, RAC1, PPP1R16B, MTMR2, SDR16C5, LYPD3, KRT1, LY6D, TSNARE1, GJB4, DSP, DSC3, EPHA10, DSG1, CAV1, CAV2, ICAM3, S100A8, FAT2, PYCARD, OR10R2,
   [0663] d. Tissue protected: Liver SLCO1B3, SLC27A5, RDH16, PLPPR2, TFR2, TSNARE1, EVA1A, CYP2D6, SLC2A2, CYP2A7, CYP1A2, CYP3A4, CYP2A6, CYP2B6, FMO3, ABCB4, CYP2C8, CYP2C19, BCL2L10, ASGR1, ABCB11, CYP2A13, DCXR, CYP2C9, ABCC2,
   [0664] e. Tissue protected: Kidney (glomeruli) VIPR2, KDR, PLA2R1, PTH2R, MME, NPHS2, TNS2, SNCA, PTPRO, EHD1, CD34, ENG, CLEC2B, ENPEP, ITGA8, EHD3, NPHS1,
   [0665] f. Tissue protected: Kidney (tubules) TRPM3, SMIM24, SLC5A12, SLC12A1, SLC6A19, SLC22A11, SLC34A3, SEL1L3, MGAT4B, PRKN, NAT8, MME, UGT2B4, SLC22A6, TMEM72, XPNPEP2, SLC3A1, SLC7A7, TMEM106C, TMEM174, SYTL2, TMPRSS2, SLC28A1, SLC13A3, PIGZ, SLC13A2, SLC4A4, TSNARE1, CDHR5, ENPP6, EFHD1, DPEP1, CUBN, HYAL2, DAB2, FAM151A, CLN6, ATRAID, FAM210A, SLC7A8, BSND, BCL2L10, AQP6, AQP1, ENPEP, SLC7A9, FXYD2, ACE, TMEM63B, DCXR, HSD3B7, LRP2, OR10R2, ABCC2, LRRK2,
   [0666] g. Tissue protected: Heart (cardiomyocytes) CD36, RASL10B, SLC22A15, BVES, PARVB, PLN, SGCG, MYORG, TMEM106C, TMEM143, TOMM40L, PRRG2, TMX2, CKMT2, CYP2W1, DSP, CAVIN4, FAM168B, CHRNA1, CLEC2B, CAV2, MLIP, OR10R2, DES,
   [0667] h. Tissue protected: Thyroid ENPP1, TPO, SLC8A1, UTRN, UNC13B, RAB43, IYD, EMC9, CYP2W1, MAP1LC3B,
   [0668] i. Tissue protected: Pancreatic endocrine cells (Islets) SCGN, SCG3, PTGDR2, SERP1, PTPRN, YRDC, TSPAN7, SLC30A8, SYP, PTPRN2, DGCR2, CYP2W1, GNAO1, CASR, CADPS,
   [0669] j. Tissue protected: Pancreatic exocrine cells TMED6, RASL10B, PPP1R16B, PTH2R, YRDC, SYCN, SLC38A5, SLC4A4, DPEP1, EMC9, CUZD1, KIRREL2, AQP8, GPAT2, AQP1, FAM162A, FXYD2, AQP12A, AQP12B,
[0670] 12. Cancer treated: breast cancer
   [0671] a. Tissue protected: Colon ZDHHC2, UGT2A3, TMEM60, SLC26A2, TMEM45A, PEX10, PLOD1, UGT2B17, UGT2B28, TMEM253, UGT2B15, PIGZ, SLC39A14, SLC6A15, SDCBP2, CDHR5, DPEP1, ACSL5, CLCA1, GBA2, FPR2, HTR1A, CEACAM5, BRI3, GAL3ST2, B3GNT8, CDH17, EPB41L2, CDH26, GPA33, MUC13,
   [0672] b. Tissue protected: Lung SLC22A15, SLC25A17, AGER, SLC6A15, STEAP1, CCR7, CAV1, CAV2, EPB41L2, LAMP3,
   [0673] c. Tissue protected: Skin PERP, TMEM134, KRT1, SRC, LY6D, FGFR2, DSP, DSC3, EPHA10, DSG1, CAV1, CAV2, ORAI1, TMEM243, FAT2, FGFBP1, OR10R2,
   [0674] d. Tissue protected: Liver SLCO1B3, SLC25A43, SLC27A5, SLC25A20, TFR2, CRK, EVA1A, CYP2D6, ACSL5, SLC2A2, CYP2A7, CYP1A2, CYP3A4, CYP2B6, FMO3, CYP2C8, CDH2, CYP2C19, BCL2L10, AIG1, ASGR1, ABCB11, DCXR, HSD11B1, CYP2C9, ABCC2, DPP4,
   [0675] e. Tissue protected: Kidney (glomeruli) ZDHHC6, ACER3, VIPR2, KDR, PODXL, KIRREL1, PLPP1, PLA2R1, PTH2R, MAP6, MME, NPHS2, SNCA, RYK, PTPRO, SLC35B1, EHD1, CD34, ENG, ENPEP, ITGA8, EHD3, DYSF,
   [0676] f. Tissue protected: Kidney (tubules) TRPM3, C2CD2, FCAMR, SLC5A12, SLC12A1, SLC6A19, SLC34A3, VPS26B, VHL, KCNJ1, SEL1L3, UCHL1, MGAT4B, LRRC55, NAT8, MME, UGT2B4, SLC22A6, TMEM72, SLC7A7, UGT1A6, TMEM174, TMPRSS2, SLC28A1, SLC13A3, PIGZ, SLC13A2, SLC4A4, CRK, CDHR5, ENPP6, DPEP1, CUBN, HYAL2, ACSL5, CDH6, FAM151A, HTR1A, CLIC4, CDH2, SLC7A8, BSND, BCL2L10, AQP6, AQP1, ENPEP, FXYD2, ACE, DCXR, CDH16, OR10R2, NDUFB9, ABCC2, DPP4,
   [0677] g. Tissue protected: Heart (cardiomyocytes) SLC22A15, SGCB, NDUFS8, PLN, PVR, SGCG, TMEM143, CKMT2, DSP, FAM168B, CHRNA1, CDH2, CAV2, CPT1B, COX7B, MLIP, OR10R2, NDUFB9, DES,
   [0678] h. Tissue protected: Thyroid ZDHHC6, SLC5A5, LPCAT2, RETSAT, TPO, IFI27, LRRC55, IYD, GBA2, CDH16,
   [0679] i. Tissue protected: Pancreatic endocrine cells (Islets) ZDHHC2, SCG3, PTGDR2, RAB3B, UCHL1, PTPRN, SHISAL2B, SV2A, TSPAN7, SLC30A8, SYP, DGCR2, GNAO1, CASR, CD99, CADPS,
   [0680] j. Tissue protected: Pancreatic exocrine cells C2CD2, TMEM97, IFI27, PTH2R, SYCN, SLC4A4, DPEP1, CUZD1, KIFC3, KIRREL2, GPAT2, AQP1, CFTR, FXYD2, AQP12A, AQP12B,

[0681] Based on the description of biophysical and expression criteria for PD-1 binding moiety and surface antigen-binding moiety pairs, the following are representative, nonlimiting, and additional examples of additional LoSTIM constructs are provided in Table 4B below.

TABLE 4B

Anti-EpCAM clone 9C4
Heavy Chain:
QIQLVQSGPELKKPGETVKISCKASGYTFTNYLLNWVKQAPGKGLKWMGWINTYTGEPTYTDDFKGRFAFSLATSASTAYLQI NNLKNEDTATYFCVRLAGTKDYWGQGTTLTVSS

Light Chain:
DlVMTQAAFSNPVTLGTSASISCRSSKSLLHSNGiTYLYWYLQKPGQSPQLLIYQMSNLASGVPDRFSSSGSGTDFTLRISRVE AEDVGVYYCAQNLELPRTFGGGTKLEIK

Anti-EpCAM clone MOC31
Heavy Chain:
QVKLQQSGPELKKPGETVKISCKASGYTFTNYGMNWVKQAPGKGLKWMGWINTYTGESTYADDFKGRFAFSLETSASAAYL QINNLKNEDTATYFCARFAIKGDYWGQGTTVTVSS

Light Chain:
DIVLTQSPFSNPVTLGTSASISCRSTKSLLHSNGITYLYWYLQKPGQSPQLLIYQMSNLASGVPDRFSSSGSGTDFTLRISRVE AEDVGVYYCAQNLEIPRTFGGGTKLEIK

Anti-EpCAM adecatumumab
Heavy Chain:
EVQLLESGGGVVQPGRSLRLSCAASGFTFSSYGMHWVRQAPGKGLEWVAVISYDGSNKYYADSVKGRFTISRDNSKNTLYL QMNSLRAEDTAVYYCAKDMGWGSGWRPYYYYGMDVWGQGTTVTVSS Light Chain: ELQMTQSPSSLSASVGDRVTITCRTSQSISSYLNWYQQKPGQPPKLLIYWASTRESGVPDRFSGSGSGTDFTLTISSLQPEDS ATYYCQQSYDIPYTFGQGTKLEIK

Anti-HLA-A2 clone BB7.2
Heavy Chain:
QVQLQQSGPELVKPGASVKMSCKASGYTFTSYHIQWVKQRPGQGLEWIGWIYPGDGSTQYNEKFKGKTTLTADKSSSTAYM LLSSLTSEDSAIYFCAREGTYYAMDYWGQGTSVTVSS Light Chain: DVLMTQTPLSLPVSLGDQVSISCRSSQSIVHSNGNTYLEWYLQKPGQSPKLLIYKVSNRFSGVPDRFSGSGSGTDFTLKISRV EAEDLGVYYCFQGSHVPRTFGGGTKLEIK

Anti-MHC II (pan-allele) clone 9.49
Heavy Chain:
EVQLQESGPSLVRPSQTLSLTCSVTGDSITSSYWNWIRKFPGNKLEYMGYITYSGNTYYTPSLKSRISITRDTSKNQYFLQLNS VTTEDTATYYCSRDYGRGDYAMVYWGQGTSVTVSS Light Chain: DVVLTQSPATLSVTPGDSVSLSCRASQSIINNLHWYHQKSHESPRLLIKYASQSISGIPSRFSGSGSGTDFTLSINSVETEDFGV YFCQQSGSWPYTFGGGSNLEIK

Anti-PD-1 (pembrolizumab)
Heavy Chain:
[sequence omitted]

Light Chain:
[sequence omitted]

Anti-PD-1 (nivolumab)
Heavy Chain:
[sequence omitted]

Light Chain:
[sequence omitted]

Kappa liqht chain constant region
[sequence omitted]

IqG4-SPLE
ASTKGPSVFPLAPCSRSTSESTAALGCLVKDYFPEPVTVSWNSGALTSGVHTFPAVLQSSGLYSLSSVVTVPSSSLGTKTYTC NVDHKPSNTKVDKRVESKYGPPCPSCPAPEFLGGPSVFLFPPKPKDTLMISRTPEVTCVVVDVSQEDPEVQFNWYVDGVEV HNAKTKPREEQFNSTYRVVSVLTVLHQDWLNGKEYKCKVSNKGLPSSIEKTISKAKGQPREPQVYTLPPSQEEMTKNQVSLT CLVKGFYPSDIAVEWESNGQPENNYKTTPPVLDSDGSFFLYSRLTVDKSRWQEGNVFSCSVMHEALHNHYTQKSLSLSLGK

IgG1-LALA-KnoblT366V1O
ASTKGPSVFPLAPSSKSTSGGTAALGCLVKDYFPEPVTVSWNSGALTSGVHTFPAVLQSSGLYSLSSVVTVPSSSLGTQTYIC NVNHKPSNTKVDKKVEPKSCDKTHTCPPCPAPEAAGGPSVFLFPPKPKDTLMISRTPEVTCVVVDVSHEDPEVKFNWYVDGV EVHNAKTKPREEQYNSTYRVVSVLTVLHQDWLNGKEYKCKVSNKALPAPIEKTISKAKGQPREPQVYTLPPSRDELTKNQVSL WCLVKGFYPSDIAVEWESNGQPENNYKTTPPVLDSDGSFFLYSKLTVDKSRWQQGNVFSCSVMHEALHNHYTQKSLSLSPG K

Hole(T366S,L368AandY407V):
ASTKGPSVFPLAPSSKSTSGGTAALGCLVKDYFPEPVTVSWNSGALTSGVHTFPAVLQSSGLYSLSSVVTVPSSSLGTQTYIC NVNHKPSNTKVDKKVEPKSCDKTHTCPPCPAPEAAGGPSVFLFPPKPKDTLMISRTPEVTCVVVDVSHEDPEVKFNWYVDGV EVHNAKTKPREEQYNSTYRVVSVLTVLHQDWLNGKEYKCKVSNKALPAPIEKTISKAKGQPREPQVYTLPPSRDELTKNQVSL SCAVKGFYPSDIAVEWESNGQPENNYKTTPPVLDSDGSFFLVSKLTVDKSRWQQGNVFSCSVMHEALHNHYTQKSLSLSPG K

G4S linker to connect VH and VL regions to construct scFv
GGGGSGGGGSGGGGS

G4AG4 linker to separate domains
GGGGAGGGG

### > Seq 32: 9C4-Pembrolizumab (EpCAM-PD-1)IgG4-SPLE C-Terminal scFv Bivalent Bispecific sAg-PD-1 scFv Orientation 1

[0682] > Heavy Chain:

QIQLVQSGPELKKPGETVKISCKASGYTFTNYLLNWVKQAPGKGLKWMGW
INTYTGEPTYTDDFK GRFAFSLATSASTAYLQINNLKNEDTATYFCVRL
AGTKDYWGQGTTLTVSSASTKGPSVFPLAPC SRSTSESTAALGCLVKDY
FPEPVTVSWNSGALTSGVHTFPAVLQSSGLYSLSSVVTVPSSSLGTK TY
TCNVDHKPSNTKVDKRVESKYGPPCPSCPAPEFLGGPSVFLFPPKPKDTL
MISRTPEVTCVVV DVSQEDPEVQFNWYVDGVEVHNAKTKPREEQFNSTY
RVVSVLTVLHQDWLNGKEYKCKVSNKGLP SSIEKTISKAKGQPREPQVY
TLPPSQEEMTKNQVSLTCLVKGFYPSDIAVEWESNGQPENNYKTT PPVL
DSDGSFFLYSRLTVDKSRWQEGNVFSCSVMHEALHNHYTQKSLSLSLGKG
GGGAGGGGQVQ LVQSGVEVKKPGASVKVSCKASGYTFTNYYMYWVRQAP
GQGLEWMGGINPSNGGTNFNEKFKNRV TLTTDSSTTTAYMELKSLQFDD
TAVYYCARRDYRFDMGFDYWGQGTTVTVSSGGGGSGGGGSGGG GSEIVL
TQSPATLSLSPGERATLSCRASKGVSTSGYSYLHWYQQKPGQAPRLLIYL
ASYLESGVP ARFSGSGSGTDFTLTISSLEPEDFAVYYCQHSRDLPLTFG
GGTKVEIK

### > Seq 33: 9C4-Pembrolizumab (EpCAM-PD-1)IgG4-SPLE C-terminal scFv Bivalent Bispecific sAg-PD-1 scFv Orientation 1

[0683] > Light Chain:

DIVMTQAAFSNPVTLGTSASISCRSSKSLLHSNGITYLYWYLQKPGQSPQ
LLIYQMSNLASGVPD RFSSSGSGTDFTLRISRVEAEDVGVYYCAQNLEL
PRTFGGGTKLEIKRTVAAPSVFIFPPSDEQL KSGTASVVCLLNNFYPRE
AKVQWKVDNALQSGNSQESVTEQDSKDSTYSLSSTLTLSKADYEKHK VY
ACEVTHQGLSSPVTKSFNRGEC

### > Seq 34: 9C4-Pembrolizumab IgG4-SPLE C-Terminal scFv Bivalent Bispecific sAg-PD-1 scFv Orientation 2

[0684] > Heavy Chain:

QIQLVQSGPELKKPGETVKISCKASGYTFTNYLLNWVKQAPGKGLKWMG
WINTYTGEPTYTDDFK GRFAFSLATSASTAYLQINNLKNEDTATYFCVR
LAGTKDYWGQGTTLTVSSASTKGPSVFPLAPC SRSTSESTAALGCLVKD
YFPEPVTVSWNSGALTSGVHTFPAVLQSSGLYSLSSVVTVPSSSLGTK T
YTCNVDHKPSNTKVDKRVESKYGPPCPSCPAPEFLGGPSVFLFPPKPKDT
LMISRTPEVTCVVV DVSQEDPEVQFNWYVDGVEVHNAKTKPREEQFNST
YRVVSVLTVLHQDWLNGKEYKCKVSNKGLP SSIEKTISKAKGQPREPQV
YTLPPSQEEMTKNQVSLTCLVKGFYPSDIAVEWESNGQPENNYKTT PPV
LDSDGSFFLYSRLTVDKSRWQEGNVFSCSVMHEALHNHYTQKSLSLSLGK
GGGGAGGGGEIV LTQSPATLSLSPGERATLSCRASKGVSTSGYSYLHWY
QQKPGQAPRLLIYLASYLESGVPARFSG SGSGTDFTLTISSLEPEDFAV
YYCQHSRDLPLTFGGGTKVEIKGGGGSGGGGSGGGGSQVQLVQS GVEVK
KPGASVKVSCKASGYTFTNYYMYWVRQAPGQGLEWMGGINPSNGGTNFNE
KFKNRVTLTT DSSTTTAYMELKSLQFDDTAVYYCARRDYRFDMGFDYWG
QGTTVTVSS

### > Seq 35: 9C4-Pembrolizumab (EpCAM-PD-1)IgG4-SPLE C-terminal scFv Bivalent Bispecific sAg-PD-1 scFv Orientation 2

[0685] > Light Chain:

DIVMTQAAFSNPVTLGTSASISCRSSKSLLHSNGITYLYWYLQKPGQSPQ
LLIYQMSNLASGVPD RFSSSGSGTDFTLRISRVEAEDVGVYYCAQNLEL
PRTFGGGTKLEIKRTVAAPSVFIFPPSDEQL KSGTASVVCLLNNFYPRE
AKVQWKVDNALQSGNSQESVTEQDSKDSTYSLSSTLTLSKADYEKHK VY
ACEVTHQGLSSPVTKSFNRGEC

### > Seq 36: 9C4-Pembrolizumab IgG4-SPLE C-Terminal scFv Bivalent Bispecific PD-1-sAg scFv Orientation 1

[0686] > Heavy Chain:

QVQLVQSGVEVKKPGASVKVSCKASGYTFTNYYMYWVRQAPGQGLEWMG
GINPSNGGTNFNEKFK NRVTLTTDSSTTTAYMELKSLQFDDTAVYYCAR
RDYRFDMGFDYWGQGTTVTVSSASTKGPSVFP LAPCSRSTSESTAALGC
LVKDYFPEPVTVSWNSGALTSGVHTFPAVLQSSGLYSLSSVVTVPSSS L
GTKTYTCNVDHKPSNTKVDKRVESKYGPPCPSCPAPEFLGGPSVFLFPPK
PKDTLMISRTPEVT CVVVDVSQEDPEVQFNWYVDGVEVHNAKTKPREEQ
FNSTYRVVSVLTVLHQDWLNGKEYKCKVSN KGLPSSIEKTISKAKGQPR
EPQVYTLPPSQEEMTKNQVSLTCLVKGFYPSDIAVEWESNGQPENN YKT
TPPVLDSDGSFFLYSRLTVDKSRWQEGNVFSCSVMHEALHNHYTQKSLSL
SLGKGGGGAGGG GQIQLVQSGPELKKPGETVKISCKASGYTFTNYLLNW
VKQAPGKGLKWMGWINTYTGEPTYTDDF KGRFAFSLATSASTAYLQINN
LKNEDTATYFCVRLAGTKDYWGQGTTLTVSSGGGGSGGGGSGGG GSDIV
MTQAAFSNPVTLGTSASISCRSSKSLLHSNGITYLYWYLQKPGQSPQLLI
YQMSNLASGV PDRFSSSGSGTDFTLRISRVEAEDVGVYYCAQNLELPRT
FGGGTKLEIK

### > Seq 37: 9C4-Pembrolizumab (EpCAM-PD-1)IgG4-SPLE C-Terminal scFv Bivalent Bispecific PD-1-sAg scFv Orientation 1

[0687] > Light Chain:

EIVLTQSPATLSLSPGERATLSCRASKGVSTSGYSYLHWYQQKPGQAPR
LLIYLASYLESGVPAR FSGSGSGTDFTLTISSLEPEDFAVYYCQHSRDL
PLTFGGGTKVEIKRTVAAPSVFIFPPSDEQLK SGTASVVCLLNNFYPRE
AKVQWKVDNALQSGNSQESVTEQDSKDSTYSLSSTLTLSKADYEKHKV Y
ACEVTHQGLSSPVTKSFNRGEC

### > Seq 38: 9C4-Pembrolizumab IgG4-SPLE C-Terminal scFv Bivalent Bispecific PD1-sAg scFv Orientation 2

[0688] > Heavy Chain:

QVQLVQSGVEVKKPGASVKVSCKASGYTFTNYYMYWVRQAPGQGLEWMG
GINPSNGGTNFNEKFK NRVTLTTDSSTTTAYMELKSLQFDDTAVYYCAR
RDYRFDMGFDYWGQGTTVTVSSASTKGPSVFP LAPCSRSTSESTAALGC
LVKDYFPEPVTVSWNSGALTSGVHTFPAVLQSSGLYSLSSVVTVPSSS L
GTKTYTCNVDHKPSNTKVDKRVESKYGPPCPSCPAPEFLGGPSVFLFPPK
PKDTLMISRTPEVT CVVVDVSQEDPEVQFNWYVDGVEVHNAKTKPREEQ
FNSTYRVVSVLTVLHQDWLNGKEYKCKVSN KGLPSSIEKTISKAKGQPR
EPQVYTLPPSQEEMTKNQVSLTCLVKGFYPSDIAVEWESNGQPENN YKT
TPPVLDSDGSFFLYSRLTVDKSRWQEGNVFSCSVMHEALHNHYTQKSLSL
SLGKGGGGAGGG GDIVMTQAAFSNPVTLGTSASISCRSSKSLLHSNGIT
YLYWYLQKPGQSPQLLIYQMSNLASGVP DRFSSSGSGTDFTLRISRVEA
EDVGVYYCAQNLELPRTFGGGTKLEIKGGGGSGGGGSGGGGSQI QLVQS
GPELKKPGETVKISCKASGYTFTNYLLNWVKQAPGKGLKWMGWINTYTGE
PTYTDDFKGR FAFSLATSASTAYLQINNLKNEDTATYFCVRLAGTKDYW
GQGTTLTVSS

### > Seq 39: 9C4-Pembrolizumab (EpCAM-PD-1)IgG4-SPLE C-Terminal scFv Bivalent Bispecific PD1-sAg scFv Orientation 2

[0689] > Light Chain:

EIVLTQSPATLSLSPGERATLSCRASKGVSTSGYSYLHWYQQKPGQAPRL
LIYLASYLESGVPAR FSGSGSGTDFTLTISSLEPEDFAVYYCQHSRDLP
LTFGGGTKVEIKRTVAAPSVFIFPPSDEQLK SGTASVVCLLNNFYPREA
KVQWKVDNALQSGNSQESVTEQDSKDSTYSLSSTLTLSKADYEKHKV YA
CEVTHQGLSSPVTKSFNRGEC

### > Seq 40: 9C4-Pembrolizumab IgG1-KIH-LALA C-Terminal scFv PD1 Monovalent, sAg Bivalent Bispecific 1

[0690] > Heavy Chain 1:

QIQLVQSGPELKKPGETVKISCKASGYTFTNYLLNWVKQAPGKGLKWMGW
INTYTGEPTYTDDFK GRFAFSLATSASTAYLQINNLKNEDTATYFCVRL
AGTKDYWGQGTTLTVSSASTKGPSVFPLAPS SKSTSGGTAALGCLVKDY
FPEPVTVSWNSGALTSGVHTFPAVLQSSGLYSLSSVVTVPSSSLGTQ TY
ICNVNHKPSNTKVDKKVEPKSCDKTHTCPPCPAPEAAGGPSVFLFPPKPK
DTLMISRTPEVTC VVVDVSHEDPEVKFNWYVDGVEVHNAKTKPREEQYN
STYRVVSVLTVLHQDWLNGKEYKCKVSNK ALPAPIEKTISKAKGQPREP
QVYTLPPSRDELTKNQVSLWCLVKGFYPSDIAVEWESNGQPENNY KTTP
PVLDSDGSFFLYSKLTVDKSRWQQGNVFSCSVMHEALHNHYTQKSLSLSP
GKGGGGAGGGG QVQLVQSGVEVKKPGASVKVSCKASGYTFTNYYMYWVR
QAPGQGLEWMGGINPSNGGTNFNEKFK NRVTLTTDSSTTTAYMELKSLQ
FDDTAVYYCARRDYRFDMGFDYWGQGTTVTVSSGGGGSGGGGS GGGGSE
IVLTQSPATLSLSPGERATLSCRASKGVSTSGYSYLHWYQQKPGQAPRLL
IYLASYLES GVPARFSGSGSGTDFTLTISSLEPEDFAVYYCQHSRDLPL
TFGGGTKVEIK

### > Seq 41: 9C4-Pembrolizumab IgG1-KIH-LALA C-Terminal scFv PD1 Monovalent, sAg Bivalent Bispecific 1

[0691] > Heavy Chain 2:

QIQLVQSGPELKKPGETVKISCKASGYTFTNYLLNWVKQAPGKGLKWMGW
INTYTGEPTYTDDFK GRFAFSLATSASTAYLQINNLKNEDTATYFCVRL
AGTKDYWGQGTTLTVSSASTKGPSVFPLAPS SKSTSGGTAALGCLVKDY
FPEPVTVSWNSGALTSGVHTFPAVLQSSGLYSLSSVVTVPSSSLGTQ TY
ICNVNHKPSNTKVDKKVEPKSCDKTHTCPPCPAPEAAGGPSVFLFPPKPK
DTLMISRTPEVTC VVVDVSHEDPEVKFNWYVDGVEVHNAKTKPREEQYN
STYRVVSVLTVLHQDWLNGKEYKCKVSNK ALPAPIEKTISKAKGQPREP
QVYTLPPSRDELTKNQVSLWCLVKGFYPSDIAVEWESNGQPENNY KTTP
PVLDSDGSFFLYSKLTVDKSRWQQGNVFSCSVMHEALHNHYTQKSLSLSP
GK

### > Seq 42: 9C4-Pembrolizumab (EpCAM-PD-1)IgG1-KIH-LALA C-Terminal scFv PD1 Monovalent, sAg Bivalent Bispecific 1

[0692] > Light Chain:

DIVMTQAAFSNPVTLGTSASISCRSSKSLLHSNGITYLYWYLQKPGQSPQ
LLIYQMSNLASGVPD RFSSSGSGTDFTLRISRVEAEDVGVYYCAQNLEL
PRTFGGGTKLEIKRTVAAPSVFIFPPSDEQL KSGTASVVCLLNNFYPRE
AKVQWKVDNALQSGNSQESVTEQDSKDSTYSLSSTLTLSKADYEKHK VY
ACEVTHQGLSSPVTKSFNRGEC

### > Seq 43: 9C4-Pembrolizumab IgG1-KIH-LALA C-Terminal scFv PD1 Monovalent, sAg Bivalent Bispecific 2

[0693] > Heavy Chain 1:

QIQLVQSGPELKKPGETVKISCKASGYTFTNYLLNWVKQAPGKGLKWMGW
INTYTGEPTYTDDFK GRFAFSLATSASTAYLQINNLKNEDTATYFCVRL
AGTKDYWGQGTTLTVSSASTKGPSVFPLAPS SKSTSGGTAALGCLVKDY
FPEPVTVSWNSGALTSGVHTFPAVLQSSGLYSLSSVVTVPSSSLGTQ TY
ICNVNHKPSNTKVDKKVEPKSCDKTHTCPPCPAPEAAGGPSVFLFPPKPK
DTLMISRTPEVTC VVVDVSHEDPEVKFNWYVDGVEVHNAKTKPREEQYN
STYRVVSVLTVLHQDWLNGKEYKCKVSNK ALPAPIEKTISKAKGQPREP
QVYTLPPSRDELTKNQVSLWCLVKGFYPSDIAVEWESNGQPENNY KTTP
PVLDSDGSFFLYSKLTVDKSRWQQGNVFSCSVMHEALHNHYTQKSLSLSP
GKGGGGAGGGG EIVLTQSPATLSLSPGERATLSCRASKGVSTSGYSYLH
WYQQKPGQAPRLLIYLASYLESGVPAR FSGSGSGTDFTLTISSLEPEDF
AVYYCQHSRDLPLTFGGGTKVEIKGGGGSGGGGSGGGGSQVQL VQSGVE
VKKPGASVKVSCKASGYTFTNYYMYWVRQAPGQGLEWMGGINPSNGGTNF
NEKFKNRVT LTTDSSTTTAYMELKSLQFDDTAVYYCARRDYRFDMGFDY
WGQGTTVTVSS

### > Seq 43: 9C4-Pembrolizumab IgG1-KIH-LALA C-Terminal scFv PD1 Monovalent, sAg Bivalent Bispecific 2

[0694] > Heavy Chain 2:

QIQLVQSGPELKKPGETVKISCKASGYTFTNYLLNWVKQAPGKGLKWMGW
INTYTGEPTYTDDFK GRFAFSLATSASTAYLQINNLKNEDTATYFCVRL
AGTKDYWGQGTTLTVSSASTKGPSVFPLAPS SKSTSGGTAALGCLVKDY
FPEPVTVSWNSGALTSGVHTFPAVLQSSGLYSLSSVVTVPSSSLGTQ TY
ICNVNHKPSNTKVDKKVEPKSCDKTHTCPPCPAPEAAGGPSVFLFPPKPK
DTLMISRTPEVTC VVVDVSHEDPEVKFNWYVDGVEVHNAKTKPREEQYN
STYRVVSVLTVLHQDWLNGKEYKCKVSNK ALPAPIEKTISKAKGQPREP
QVYTLPPSRDELTKNQVSLWCLVKGFYPSDIAVEWESNGQPENNY KTTP
PVLDSDGSFFLYSKLTVDKSRWQQGNVFSCSVMHEALHNHYTQKSLSLSP
GK

### > Seq 44: 9C4-Pembrolizumab (EpCAM-PD-1)IgG1-KIH-LALA C-Terminal scFv PD1 Monovalent, sAg Bivalent Bispecific 2

[0695] > Light Chain:

DIVMTQAAFSNPVTLGTSASISCRSSKSLLHSNGITYLYWYLQKPGQSPQ
LLIYQMSNLASGVPD RFSSSGSGTDFTLRISRVEAEDVGVYYCAQNLEL
PRTFGGGTKLEIKRTVAAPSVFIFPPSDEQL KSGTASVVCLLNNFYPRE
AKVQWKVDNALQSGNSQESVTEQDSKDSTYSLSSTLTLSKADYEKHK VY
ACEVTHQGLSSPVTKSFNRGEC

### > Seq 45: 9C4-Pembrolizumab IgG1-KIH-LALA C-Terminal scFv PD1 Monovalent, sAg Bivalent Bispecific 3

[0696] > Heavy Chain 1:

QIQLVQSGPELKKPGETVKISCKASGYTFTNYLLNWVKQAPGKGLKWMGW
INTYTGEPTYTDDFK GRFAFSLATSASTAYLQINNLKNEDTATYFCVRL
AGTKDYWGQGTTLTVSSASTKGPSVFPLAPS SKSTSGGTAALGCLVKDY
FPEPVTVSWNSGALTSGVHTFPAVLQSSGLYSLSSVVTVPSSSLGTQ TY
ICNVNHKPSNTKVDKKVEPKSCDKTHTCPPCPAPEAAGGPSVFLFPPKPK
DTLMISRTPEVTC VVVDVSHEDPEVKFNWYVDGVEVHNAKTKPREEQYN
STYRVVSVLTVLHQDWLNGKEYKCKVSNK ALPAPIEKTISKAKGQPREP
QVYTLPPSRDELTKNQVSLWCLVKGFYPSDIAVEWESNGQPENNY KTTP
PVLDSDGSFFLYSKLTVDKSRWQQGNVFSCSVMHEALHNHYTQKSLSLSP
GKGGGGAGGGG QVQLVQSGVEVKKPGASVKVSCKASGYTFTNYYMYWVR
QAPGQGLEWMGGINPSNGGTNFNEKFK NRVTLTTDSSTTTAYMELKSLQ
FDDTAVYYCARRDYRFDMGFDYWGQGTTVTVSSGGGGSGGGGS GGGGSE
IVLTQSPATLSLSPGERATLSCRASKGVSTSGYSYLHWYQQKPGQAPRLL
IYLASYLES GVPARFSGSGSGTDFTLTISSLEPEDFAVYYCQHSRDLPL
TFGGGTKVEIK

### > Seq 46: 9C4-Pembrolizumab IgG1-KIH-LALA C-Terminal scFv PD1 Monovalent, sAg Bivalent Bispecific 3

[0697] > Heavy Chain 2:

QIQLVQSGPELKKPGETVKISCKASGYTFTNYLLNWVKQAPGKGLKWMGW
INTYTGEPTYTDDFK GRFAFSLATSASTAYLQINNLKNEDTATYFCVRL
AGTKDYWGQGTTLTVSSASTKGPSVFPLAPS SKSTSGGTAALGCLVKDY
FPEPVTVSWNSGALTSGVHTFPAVLQSSGLYSLSSVVTVPSSSLGTQ TY
ICNVNHKPSNTKVDKKVEPKSCDKTHTCPPCPAPEAAGGPSVFLFPPKPK
DTLMISRTPEVTC VVVDVSHEDPEVKFNWYVDGVEVHNAKTKPREEQYN
STYRVVSVLTVLHQDWLNGKEYKCKVSNK ALPAPIEKTISKAKGQPREP
QVYTLPPSRDELTKNQVSLWCLVKGFYPSDIAVEWESNGQPENNY KTTP
PVLDSDGSFFLYSKLTVDKSRWQQGNVFSCSVMHEALHNHYTQKSLSLSP
GK

### > Seq 47: 9C4-Pembrolizumab (EpCAM-PD-1)IgG1-KIH-LALA C-Terminal scFv PD1 Monovalent, sAg Bivalent Bispecific 3

[0698] > Light Chain:

DIVMTQAAFSNPVTLGTSASISCRSSKSLLHSNGITYLYWYLQKPGQSPQ
LLIYQMSNLASGVPD RFSSSGSGTDFTLRISRVEAEDVGVYYCAQNLEL
PRTFGGGTKLEIKRTVAAPSVFIFPPSDEQL KSGTASVVCLLNNFYPRE
AKVQWKVDNALQSGNSQESVTEQDSKDSTYSLSSTLTLSKADYEKHK VY
ACEVTHQGLSSPVTKSFNRGEC

### > Seq 48: 9C4-Pembrolizumab IgG1-KIH-LALA C-Terminal scFv PD1 Monovalent, sAg Bivalent Bispecific 4

[0699] > Heavy Chain 1:

QIQLVQSGPELKKPGETVKISCKASGYTFTNYLLNWVKQAPGKGLKWMGW
INTYTGEPTYTDDFK GRFAFSLATSASTAYLQINNLKNEDTATYFCVRL
AGTKDYWGQGTTLTVSSASTKGPSVFPLAPS SKSTSGGTAALGCLVKDY
FPEPVTVSWNSGALTSGVHTFPAVLQSSGLYSLSSVVTVPSSSLGTQ TY
ICNVNHKPSNTKVDKKVEPKSCDKTHTCPPCPAPEAAGGPSVFLFPPKPK
DTLMISRTPEVTC VVVDVSHEDPEVKFNWYVDGVEVHNAKTKPREEQYN
STYRVVSVLTVLHQDWLNGKEYKCKVSNK ALPAPIEKTISKAKGQPREP
QVYTLPPSRDELTKNQVSLWCLVKGFYPSDIAVEWESNGQPENNY KTTP
PVLDSDGSFFLYSKLTVDKSRWQQGNVFSCSVMHEALHNHYTQKSLSLSP
GKGGGGAGGGG EIVLTQSPATLSLSPGERATLSCRASKGVSTSGYSYLH
WYQQKPGQAPRLLIYLASYLESGVPAR FSGSGSGTDFTLTISSLEPEDF
AVYYCQHSRDLPLTFGGGTKVEIKGGGGSGGGGSGGGGSQVQL VQSGVE
VKKPGASVKVSCKASGYTFTNYYMYWVRQAPGQGLEWMGGINPSNGGTNF
NEKFKNRVT LTTDSSTTTAYMELKSLQFDDTAVYYCARRDYRFDMGFDY
WGQGTTVTVSS

### > Seq 49: 9C4-Pembrolizumab (EpCAM-PD-1)IgG1-KIH-LALA C-Terminal scFv PD1 Monovalent, sAg Bivalent Bispecific 4

[0700] > Heavy Chain 2:

QIQLVQSGPELKKPGETVKISCKASGYTFTNYLLNWVKQAPGKGLKWMGW
INTYTGEPTYTDDFK GRFAFSLATSASTAYLQINNLKNEDTATYFCVRL
AGTKDYWGQGTTLTVSSASTKGPSVFPLAPS SKSTSGGTAALGCLVKDY
FPEPVTVSWNSGALTSGVHTFPAVLQSSGLYSLSSVVTVPSSSLGTQ TY
ICNVNHKPSNTKVDKKVEPKSCDKTHTCPPCPAPEAAGGPSVFLFPPKPK
DTLMISRTPEVTC VVVDVSHEDPEVKFNWYVDGVEVHNAKTKPREEQYN
STYRVVSVLTVLHQDWLNGKEYKCKVSNK ALPAPIEKTISKAKGQPREP
QVYTLPPSRDELTKNQVSLWCLVKGFYPSDIAVEWESNGQPENNY KTTP
PVLDSDGSFFLYSKLTVDKSRWQQGNVFSCSVMHEALHNHYTQKSLSLSP
GK

### > Seq 50: 9C4-Pembrolizumab (EpCAM-PD-1)IgG1-KIH-LALA C-Terminal scFv PD1 Monovalent, sAg Bivalent Bispecific 4

[0701] > Light Chain:

DIVMTQAAFSNPVTLGTSASISCRSSKSLLHSNGITYLYWYLQKPGQSPQ
LLIYQMSNLASGVPD RFSSSGSGTDFTLRISRVEAEDVGVYYCAQNLEL
PRTFGGGTKLEIKRTVAAPSVFIFPPSDEQL KSGTASVVCLLNNFYPRE
AKVQWKVDNALQSGNSQESVTEQDSKDSTYSLSSTLTLSKADYEKHK VY
ACEVTHQGLSSPVTKSFNRGEC

### > Seq 51: 9C4-Pembrolizumab IgG1-KIH-LALA Monovalent Bispecific 1

[0702] > Heavy Chain 1:

QIQLVQSGPELKKPGETVKISCKASGYTFTNYLLNWVKQAPGKGLKWMGW
INTYTGEPTYTDDFK GRFAFSLATSASTAYLQINNLKNEDTATYFCVRL
AGTKDYWGQGTTLTVSSASTKGPSVFPLAPS SKSTSGGTAALGCLVKDY
FPEPVTVSWNSGALTSGVHTFPAVLQSSGLYSLSSVVTVPSSSLGTQ TY
ICNVNHKPSNTKVDKKVEPKSCDKTHTCPPCPAPEAAGGPSVFLFPPKPK
DTLMISRTPEVTC VVVDVSHEDPEVKFNWYVDGVEVHNAKTKPREEQYN
STYRVVSVLTVLHQDWLNGKEYKCKVSNK ALPAPIEKTISKAKGQPREP
QVYTLPPSRDELTKNQVSLWCLVKGFYPSDIAVEWESNGQPENNY KTTP
PVLDSDGSFFLYSKLTVDKSRWQQGNVFSCSVMHEALHNHYTQKSLSLSP
GK

### > Seq 52: 9C4-Pembrolizumab (EpCAM-PD-1)IgG1-KIH-LALA Monovalent Bispecific 1

[0703] > Heavy Chain 2:

QVQLVQSGVEVKKPGASVKVSCKASGYTFTNYYMYWVRQAPGQGLEWMGG
INPSNGGTNFNEKFK NRVTLTTDSSTTTAYMELKSLQFDDTAVYYCARR
DYRFDMGFDYWGQGTTVTVSSASTKGPSVFP LAPSSKSTSGGTAALGCL
VKDYFPEPVTVSWNSGALTSGVHTFPAVLQSSGLYSLSSVVTVPSSS LG
TQTYICNVNHKPSNTKVDKKVEPKSCDKTHTCPPCPAPEAAGGPSVFLFP
PKPKDTLMISRTP EVTCVVVDVSHEDPEVKFNWYVDGVEVHNAKTKPRE
EQYNSTYRVVSVLTVLHQDWLNGKEYKCK VSNKALPAPIEKTISKAKGQ
PREPQVYTLPPSRDELTKNQVSLWCLVKGFYPSDIAVEWESNGQP ENNY
KTTPPVLDSDGSFFLYSKLTVDKSRWQQGNVFSCSVMHEALHNHYTQKSL
SLSPGK

### > Seq 53: 9C4-Pembrolizumab (EpCAM-PD-1)IgG1-KIH-LALA Monovalent Bispecific 1

[0704] > Light Chain 1:

DIVMTQAAFSNPVTLGTSASISCRSSKSLLHSNGITYLYWYLQKPGQSPQ
LLIYQMSNLASGVPD RFSSSGSGTDFTLRISRVEAEDVGVYYCAQNLEL
PRTFGGGTKLEIKRTVAAPSVFIFPPSDEQL KSGTASVVCLLNNFYPRE
AKVQWKVDNALQSGNSQESVTEQDSKDSTYSLSSTLTLSKADYEKHK VY
ACEVTHQGLSSPVTKSFNRGEC

### > Seq 54: 9C4-Pembrolizumab (EpCAM-PD-1)IgG1-KIH-LALA Monovalent Bispecific 1

[0705] > Light Chain 2:

EIVLTQSPATLSLSPGERATLSCRASKGVSTSGYSYLHWYQQKPGQAPRL
LIYLASYLESGVPAR FSGSGSGTDFTLTISSLEPEDFAVYYCQHSRDLP
LTFGGGTKVEIKRTVAAPSVFIFPPSDEQLK SGTASVVCLLNNFYPREA
KVQWKVDNALQSGNSQESVTEQDSKDSTYSLSSTLTLSKADYEKHKV YA
CEVTHQGLSSPVTKSFNRGEC

### > Seq 55: 9C4-Pembrolizumab IgG1-KIH-LALA Monovalent Bispecific 2

[0706] > Heavy Chain 1:

QIQLVQSGPELKKPGETVKISCKASGYTFTNYLLNWVKQAPGKGLKWMGW
INTYTGEPTYTDDFK GRFAFSLATSASTAYLQINNLKNEDTATYFCVRL
AGTKDYWGQGTTLTVSSASTKGPSVFPLAPS SKSTSGGTAALGCLVKDY
FPEPVTVSWNSGALTSGVHTFPAVLQSSGLYSLSSVVTVPSSSLGTQ TY
ICNVNHKPSNTKVDKKVEPKSCDKTHTCPPCPAPEAAGGPSVFLFPPKPK
DTLMISRTPEVTC VVVDVSHEDPEVKFNWYVDGVEVHNAKTKPREEQYN
STYRVVSVLTVLHQDWLNGKEYKCKVSNK ALPAPIEKTISKAKGQPREP
QVYTLPPSRDELTKNQVSLWCLVKGFYPSDIAVEWESNGQPENNY KTTP
PVLDSDGSFFLYSKLTVDKSRWQQGNVFSCSVMHEALHNHYTQKSLSLSP
GK

### > Seq 56: 9C4-Pembrolizumab (EpCAM-PD-1)IgG1-KIH-LALA Monovalent Bispecific 2

[0707] > Heavy Chain 2:

QVQLVQSGVEVKKPGASVKVSCKASGYTFTNYYMYWVRQAPGQGLEWMGG
INPSNGGTNFNEKFK NRVTLTTDSSTTTAYMELKSLQFDDTAVYYCARR
DYRFDMGFDYWGQGTTVTVSSASTKGPSVFP LAPSSKSTSGGTAALGCL
VKDYFPEPVTVSWNSGALTSGVHTFPAVLQSSGLYSLSSVVTVPSSS LG
TQTYICNVNHKPSNTKVDKKVEPKSCDKTHTCPPCPAPEAAGGPSVFLFP
PKPKDTLMISRTP EVTCVVVDVSHEDPEVKFNWYVDGVEVHNAKTKPRE
EQYNSTYRVVSVLTVLHQDWLNGKEYKCK VSNKALPAPIEKTISKAKGQ
PREPQVYTLPPSRDELTKNQVSLWCLVKGFYPSDIAVEWESNGQP ENNY
KTTPPVLDSDGSFFLYSKLTVDKSRWQQGNVFSCSVMHEALHNHYTQKSL
SLSPGK

### > Seq 57: 9C4-Pembrolizumab (EpCAM-PD-1)IgG1-KIH-LALA Monovalent Bispecific 2

[0708] > Light Chain 1:

DIVMTQAAFSNPVTLGTSASISCRSSKSLLHSNGITYLYWYLQKPGQSPQ
LLIYQMSNLASGVPD RFSSSGSGTDFTLRISRVEAEDVGVYYCAQNLEL
PRTFGGGTKLEIKRTVAAPSVFIFPPSDEQL KSGTASVVCLLNNFYPRE
AKVQWKVDNALQSGNSQESVTEQDSKDSTYSLSSTLTLSKADYEKHK VY
ACEVTHQGLSSPVTKSFNRGEC

### > Seq 58: 9C4-Pembrolizumab (EpCAM-PD-1)IgG1-KIH-LALA Monovalent Bispecific 2

[0709] > Light Chain 2:

EIVLTQSPATLSLSPGERATLSCRASKGVSTSGYSYLHWYQQKPGQAPRL
LIYLASYLESGVPAR FSGSGSGTDFTLTISSLEPEDFAVYYCQHSRDLP
LTFGGGTKVEIKRTVAAPSVFIFPPSDEQLK SGTASVVCLLNNFYPREA
KVQWKVDNALQSGNSQESVTEQDSKDSTYSLSSTLTLSKADYEKHKV YA
CEVTHQGLSSPVTKSFNRGEC

### > Seq 59: 9C4-Nivolumab (EpCAM-PD-1)IgG4-SPLE C-Terminal scFv Bivalent Bispecific sAg-PD-1 scFv Orientation 1

[0710] > Heavy Chain:

QIQLVQSGPELKKPGETVKISCKASGYTFTNYLLNWVKQAPGKGLKWMGW
INTYTGEPTYTDDFK GRFAFSLATSASTAYLQINNLKNEDTATYFCVRL
AGTKDYWGQGTTLTVSSASTKGPSVFPLAPC SRSTSESTAALGCLVKDY
FPEPVTVSWNSGALTSGVHTFPAVLQSSGLYSLSSVVTVPSSSLGTK TY
TCNVDHKPSNTKVDKRVESKYGPPCPSCPAPEFLGGPSVFLFPPKPKDTL
MISRTPEVTCVVV DVSQEDPEVQFNWYVDGVEVHNAKTKPREEQFNSTY
RVVSVLTVLHQDWLNGKEYKCKVSNKGLP SSIEKTISKAKGQPREPQVY
TLPPSQEEMTKNQVSLTCLVKGFYPSDIAVEWESNGQPENNYKTT PPVL
DSDGSFFLYSRLTVDKSRWQEGNVFSCSVMHEALHNHYTQKSLSLSLGKG
GGGAGGGGQVQ LVESGGGVVQPGRSLRLDCKASGITFSNSGMHWVRQAP
GKGLEWVAVIWYDGSKRYYADSVKGRF TISRDNSKNTLFLQMNSLRAED
TAVYYCATNDDYWGQGTLVTVSSGGGGSGGGGSGGGGSEIVLT QSPATL
SLSPGERATLSCRASQSVSSYLAWYQQKPGQAPRLLIYDASNRATGIPAR
FSGSGSGTD FTLTISSLEPEDFAVYYCQQSSNWPRTFGQGTKVEIK

### > Seq 60: 9C4-Nivolumab (EpCAM-PD-1)IgG4-SPLE C-Terminal scFv Bivalent Bispecific sAg-PD-1 scFv Orientation 1

[0711] > Light Chain:

DIVMTQAAFSNPVTLGTSASISCRSSKSLLHSNGITYLYWYLQKPGQSPQ
LLIYQMSNLASGVPD RFSSSGSGTDFTLRISRVEAEDVGVYYCAQNLEL
PRTFGGGTKLEIKRTVAAPSVFIFPPSDEQL KSGTASVVCLLNNFYPRE
AKVQWKVDNALQSGNSQESVTEQDSKDSTYSLSSTLTLSKADYEKHK VY
ACEVTHQGLSSPVTKSFNRGEC

### > Seq 61: 9C4-Nivolumab IgG4-SPLE C-Terminal scFv Bivalent Bispecific sAg-PD-1 scFv Orientation 2

[0712] > Heavy Chain:

QIQLVQSGPELKKPGETVKISCKASGYTFTNYLLNWVKQAPGKGLKWMGW
INTYTGEPTYTDDFK GRFAFSLATSASTAYLQINNLKNEDTATYFCVRL
AGTKDYWGQGTTLTVSSASTKGPSVFPLAPC SRSTSESTAALGCLVKDY
FPEPVTVSWNSGALTSGVHTFPAVLQSSGLYSLSSVVTVPSSSLGTK TY
TCNVDHKPSNTKVDKRVESKYGPPCPSCPAPEFLGGPSVFLFPPKPKDTL
MISRTPEVTCVVV DVSQEDPEVQFNWYVDGVEVHNAKTKPREEQFNSTY
RVVSVLTVLHQDWLNGKEYKCKVSNKGLP SSIEKTISKAKGQPREPQVY
TLPPSQEEMTKNQVSLTCLVKGFYPSDIAVEWESNGQPENNYKTT PPVL
DSDGSFFLYSRLTVDKSRWQEGNVFSCSVMHEALHNHYTQKSLSLSLGKG
GGGAGGGGEIV LTQSPATLSLSPGERATLSCRASQSVSSYLAWYQQKPG
QAPRLLIYDASNRATGIPARFSGSGSG TDFTLTISSLEPEDFAVYYCQQ
SSNWPRTFGQGTKVEIKGGGGSGGGGSGGGGSQVQLVESGGGV VQPGRS
LRLDCKASGITFSNSGMHWVRQAPGKGLEWVAVIWYDGSKRYYADSVKGR
FTISRDNSK NTLFLQMNSLRAEDTAVYYCATNDDYWGQGTLVTVSS

### > Seq 62: 9C4-Nivolumab (EpCAM-PD-1)IgG4-SPLE C-Terminal scFv Bivalent Bispecific sAg-PD-1 scFv Orientation 2

[0713] > Light Chain:

DIVMTQAAFSNPVTLGTSASISCRSSKSLLHSNGITYLYWYLQKPGQSPQ
LLIYQMSNLASGVPD RFSSSGSGTDFTLRISRVEAEDVGVYYCAQNLEL
PRTFGGGTKLEIKRTVAAPSVFIFPPSDEQL KSGTASVVCLLNNFYPRE
AKVQWKVDNALQSGNSQESVTEQDSKDSTYSLSSTLTLSKADYEKHK VY
ACEVTHQGLSSPVTKSFNRGEC

### > Seq 63: 9C4-Nivolumab IgG4-SPLE C-Terminal scFv Bivalent Bispecific PD-1-sAg scFv Orientation 1

[0714] > Heavy Chain:

QVQLVESGGGVVQPGRSLRLDCKASGITFSNSGMHWVRQAPGKGLEWVA
VIWYDGSKRYYADSVK GRFTISRDNSKNTLFLQMNSLRAEDTAVYYCAT
NDDYWGQGTLVTVSSASTKGPSVFPLAPCSRS TSESTAALGCLVKDYFP
EPVTVSWNSGALTSGVHTFPAVLQSSGLYSLSSVVTVPSSSLGTKTYT C
NVDHKPSNTKVDKRVESKYGPPCPSCPAPEFLGGPSVFLFPPKPKDTLMI
SRTPEVTCVVVDVS QEDPEVQFNWYVDGVEVHNAKTKPREEQFNSTYRV
VSVLTVLHQDWLNGKEYKCKVSNKGLPSSI EKTISKAKGQPREPQVYTL
PPSQEEMTKNQVSLTCLVKGFYPSDIAVEWESNGQPENNYKTTPPV LDS
DGSFFLYSRLTVDKSRWQEGNVFSCSVMHEALHNHYTQKSLSLSLGKGGG
GAGGGGQIQLVQ SGPELKKPGETVKISCKASGYTFTNYLLNWVKQAPGK
GLKWMGWINTYTGEPTYTDDFKGRFAFS LATSASTAYLQINNLKNEDTA
TYFCVRLAGTKDYWGQGTTLTVSSGGGGSGGGGSGGGGSDIVMT QAAFS
NPVTLGTSASISCRSSKSLLHSNGITYLYWYLQKPGQSPQLLIYQMSNLA
SGVPDRFSSS GSGTDFTLRISRVEAEDVGVYYCAQNLELPRTFGGGTKL
EIK

### > Seq 64: 9C4-nivolumab (EpCAM-PD-1)IgG4-SPLE C-Terminal scFv Bivalent Bispecific PD-1-sAg scFv Orientation 1

[0715] > Light Chain:

EIVLTQSPATLSLSPGERATLSCRASQSVSSYLAWYQQKPGQAPRLLIYD
ASNRATGIPARFSGS GSGTDFTLTISSLEPEDFAVYYCQQSSNWPRTFG
QGTKVEIKRTVAAPSVFIFPPSDEQLKSGTA SVVCLLNNFYPREAKVQW
KVDNALQSGNSQESVTEQDSKDSTYSLSSTLTLSKADYEKHKVYACE VT
HQGLSSPVTKSFNRGEC

### > Seq 65: 9C4-Nivolumab IgG4-SPLE C-Terminal scFv Bivalent Bispecific PD1-sAg scFv Orientation 2

[0716] > Heavy Chain:

QVQLVESGGGVVQPGRSLRLDCKASGITFSNSGMHWVRQAPGKGLEWVA
VIWYDGSKRYYADSVK GRFTISRDNSKNTLFLQMNSLRAEDTAVYYCAT
NDDYWGQGTLVTVSSASTKGPSVFPLAPCSRS TSESTAALGCLVKDYFP
EPVTVSWNSGALTSGVHTFPAVLQSSGLYSLSSVVTVPSSSLGTKTYT C
NVDHKPSNTKVDKRVESKYGPPCPSCPAPEFLGGPSVFLFPPKPKDTLMI
SRTPEVTCVVVDVS QEDPEVQFNWYVDGVEVHNAKTKPREEQFNSTYRV
VSVLTVLHQDWLNGKEYKCKVSNKGLPSSI EKTISKAKGQPREPQVYTL
PPSQEEMTKNQVSLTCLVKGFYPSDIAVEWESNGQPENNYKTTPPV LDS
DGSFFLYSRLTVDKSRWQEGNVFSCSVMHEALHNHYTQKSLSLSLGKGGG
GAGGGGDIVMTQ AAFSNPVTLGTSASISCRSSKSLLHSNGITYLYWYLQ
KPGQSPQLLIYQMSNLASGVPDRFSSSG SGTDFTLRISRVEAEDVGVYY
CAQNLELPRTFGGGTKLEIKGGGGSGGGGSGGGGSQIQLVQSGP ELKKP
GETVKISCKASGYTFTNYLLNWVKQAPGKGLKWMGWINTYTGEPTYTDDF
KGRFAFSLAT SASTAYLQINNLKNEDTATYFCVRLAGTKDYWGQGTTLT
VSS

### > Seq 66: 9C4-Nivolumab (EpCAM-PD-1)IgG4-SPLE C-Terminal scFv Bivalent Bispecific PD1-sAg scFv Orientation 2

[0717] > Light Chain:

EIVLTQSPATLSLSPGERATLSCRASQSVSSYLAWYQQKPGQAPRLLIYD
ASNRATGIPARFSGS GSGTDFTLTISSLEPEDFAVYYCQQSSNWPRTFG
QGTKVEIKRTVAAPSVFIFPPSDEQLKSGTA SVVCLLNNFYPREAKVQW
KVDNALQSGNSQESVTEQDSKDSTYSLSSTLTLSKADYEKHKVYACE VT
HQGLSSPVTKSFNRGEC

### > Seq 67: 9C4-Nivolumab IgG1-KIH-LALA C-Terminal scFv PD1 Monovalent, sAg Bivalent Bispecific 1

[0718] > Heavy Chain 1:

QIQLVQSGPELKKPGETVKISCKASGYTFTNYLLNWVKQAPGKGLKWMGW
INTYTGEPTYTDDFK GRFAFSLATSASTAYLQINNLKNEDTATYFCVRL
AGTKDYWGQGTTLTVSSASTKGPSVFPLAPS SKSTSGGTAALGCLVKDY
FPEPVTVSWNSGALTSGVHTFPAVLQSSGLYSLSSVVTVPSSSLGTQ TY
ICNVNHKPSNTKVDKKVEPKSCDKTHTCPPCPAPEAAGGPSVFLFPPKPK
DTLMISRTPEVTC VVVDVSHEDPEVKFNWYVDGVEVHNAKTKPREEQYN
STYRVVSVLTVLHQDWLNGKEYKCKVSNK ALPAPIEKTISKAKGQPREP
QVYTLPPSRDELTKNQVSLWCLVKGFYPSDIAVEWESNGQPENNY KTTP
PVLDSDGSFFLYSKLTVDKSRWQQGNVFSCSVMHEALHNHYTQKSLSLSP
GKGGGGAGGGG QVQLVESGGGVVQPGRSLRLDCKASGITFSNSGMHWVR
QAPGKGLEWVAVIWYDGSKRYYADSVK GRFTISRDNSKNTLFLQMNSLR
AEDTAVYYCATNDDYWGQGTLVTVSSGGGGSGGGGSGGGGSEI VLTQSP
ATLSLSPGERATLSCRASQSVSSYLAWYQQKPGQAPRLLIYDASNRATGI
PARFSGSGS GTDFTLTISSLEPEDFAVYYCQQSSNWPRTFGQGTKVEIK

### > Seq 68: 9C4-Nivolumab IgG1-KIH-LALA C-Terminal scFv PD1 Monovalent, sAg Bivalent Bispecific 1

[0719] > Heavy Chain 2:

QIQLVQSGPELKKPGETVKISCKASGYTFTNYLLNWVKQAPGKGLKWMGW
INTYTGEPTYTDDFK GRFAFSLATSASTAYLQINNLKNEDTATYFCVRL
AGTKDYWGQGTTLTVSSASTKGPSVFPLAPS SKSTSGGTAALGCLVKDY
FPEPVTVSWNSGALTSGVHTFPAVLQSSGLYSLSSVVTVPSSSLGTQ TY
ICNVNHKPSNTKVDKKVEPKSCDKTHTCPPCPAPEAAGGPSVFLFPPKPK
DTLMISRTPEVTC VVVDVSHEDPEVKFNWYVDGVEVHNAKTKPREEQYN
STYRVVSVLTVLHQDWLNGKEYKCKVSNK ALPAPIEKTISKAKGQPREP
QVYTLPPSRDELTKNQVSLWCLVKGFYPSDIAVEWESNGQPENNY KTTP
PVLDSDGSFFLYSKLTVDKSRWQQGNVFSCSVMHEALHNHYTQKSLSLSP
GK

### > Seq 69: 9C4-Nivolumab (EpCAM-PD-1)IgG1-KIH-LALA C-Terminal scFv PD1 Monovalent, sAg Bivalent Bispecific 1

[0720] > Light Chain:

DIVMTQAAFSNPVTLGTSASISCRSSKSLLHSNGITYLYWYLQKPGQSPQ
LLIYQMSNLASGVPD RFSSSGSGTDFTLRISRVEAEDVGVYYCAQNLEL
PRTFGGGTKLEIKRTVAAPSVFIFPPSDEQL KSGTASVVCLLNNFYPRE
AKVQWKVDNALQSGNSQESVTEQDSKDSTYSLSSTLTLSKADYEKHK VY
ACEVTHQGLSSPVTKSFNRGEC

### > Seq 70: 9C4-Nivolumab IgG1-KIH-LALA C-Terminal scFv PD1 Monovalent, sAg Bivalent Bispecific 2

[0721] > Heavy Chain 1:

QIQLVQSGPELKKPGETVKISCKASGYTFTNYLLNWVKQAPGKGLKWMG
WINTYTGEPTYTDDFK GRFAFSLATSASTAYLQINNLKNEDTATYFCVR
LAGTKDYWGQGTTLTVSSASTKGPSVFPLAPS SKSTSGGTAALGCLVKD
YFPEPVTVSWNSGALTSGVHTFPAVLQSSGLYSLSSVVTVPSSSLGTQ T
YICNVNHKPSNTKVDKKVEPKSCDKTHTCPPCPAPEAAGGPSVFLFPPKP
KDTLMISRTPEVTC VVVDVSHEDPEVKFNWYVDGVEVHNAKTKPREEQY
NSTYRVVSVLTVLHQDWLNGKEYKCKVSNK ALPAPIEKTISKAKGQPRE
PQVYTLPPSRDELTKNQVSLWCLVKGFYPSDIAVEWESNGQPENNY KTT
PPVLDSDGSFFLYSKLTVDKSRWQQGNVFSCSVMHEALHNHYTQKSLSLS
PGKGGGGAGGGG EIVLTQSPATLSLSPGERATLSCRASQSVSSYLAWYQ
QKPGQAPRLLIYDASNRATGIPARFSGS GSGTDFTLTISSLEPEDFAVY
YCQQSSNWPRTFGQGTKVEIKGGGGSGGGGSGGGGSQVQLVESG GGVVQ
PGRSLRLDCKASGITFSNSGMHWVRQAPGKGLEWVAVIWYDGSKRYYADS
VKGRFTISRD NSKNTLFLQMNSLRAEDTAVYYCATNDDYWGQGTLVTVS
S

### > Seq 70: 9C4-Nivolumab IgG1-KIH-LALA C-Terminal scFv PD1 Monovalent, sAg Bivalent Bispecific 2

[0722] > Heavy Chain 2:

QIQLVQSGPELKKPGETVKISCKASGYTFTNYLLNWVKQAPGKGLKWMGW
INTYTGEPTYTDDFK GRFAFSLATSASTAYLQINNLKNEDTATYFCVRL
AGTKDYWGQGTTLTVSSASTKGPSVFPLAPS SKSTSGGTAALGCLVKDY
FPEPVTVSWNSGALTSGVHTFPAVLQSSGLYSLSSVVTVPSSSLGTQ TY
ICNVNHKPSNTKVDKKVEPKSCDKTHTCPPCPAPEAAGGPSVFLFPPKPK
DTLMISRTPEVTC VVVDVSHEDPEVKFNWYVDGVEVHNAKTKPREEQYN
STYRVVSVLTVLHQDWLNGKEYKCKVSNK ALPAPIEKTISKAKGQPREP
QVYTLPPSRDELTKNQVSLWCLVKGFYPSDIAVEWESNGQPENNY KTTP
PVLDSDGSFFLYSKLTVDKSRWQQGNVFSCSVMHEALHNHYTQKSLSLSP
GK

### > Seq 71: 9C4-Nivolumab (EpCAM-PD-1)IgG1-KIH-LALA C-Terminal scFv PD1 Monovalent, sAg Bivalent Bispecific 2

[0723] > Light Chain:

DIVMTQAAFSNPVTLGTSASISCRSSKSLLHSNGITYLYWYLQKPGQSPQ
LLIYQMSNLASGVPD RFSSSGSGTDFTLRISRVEAEDVGVYYCAQNLEL
PRTFGGGTKLEIKRTVAAPSVFIFPPSDEQL KSGTASVVCLLNNFYPRE
AKVQWKVDNALQSGNSQESVTEQDSKDSTYSLSSTLTLSKADYEKHK VY
ACEVTHQGLSSPVTKSFNRGEC

### > Seq 72: 9C4-Nivolumab IgG1-KIH-LALA C-Terminal scFv PD1 Monovalent, sAg Bivalent Bispecific 3

[0724] > Heavy Chain 1:

QIQLVQSGPELKKPGETVKISCKASGYTFTNYLLNWVKQAPGKGLKWMGW
INTYTGEPTYTDDFK GRFAFSLATSASTAYLQINNLKNEDTATYFCVRL
AGTKDYWGQGTTLTVSSASTKGPSVFPLAPS SKSTSGGTAALGCLVKDY
FPEPVTVSWNSGALTSGVHTFPAVLQSSGLYSLSSVVTVPSSSLGTQ TY
ICNVNHKPSNTKVDKKVEPKSCDKTHTCPPCPAPEAAGGPSVFLFPPKPK
DTLMISRTPEVTC VVVDVSHEDPEVKFNWYVDGVEVHNAKTKPREEQYN
STYRVVSVLTVLHQDWLNGKEYKCKVSNK ALPAPIEKTISKAKGQPREP
QVYTLPPSRDELTKNQVSLWCLVKGFYPSDIAVEWESNGQPENNY KTTP
PVLDSDGSFFLYSKLTVDKSRWQQGNVFSCSVMHEALHNHYTQKSLSLSP
GKGGGGAGGGG QVQLVESGGGVVQPGRSLRLDCKASGITFSNSGMHWVR
QAPGKGLEWVAVIWYDGSKRYYADSVK GRFTISRDNSKNTLFLQMNSLR
AEDTAVYYCATNDDYWGQGTLVTVSSGGGGSGGGGSGGGGSEI VLTQSP
ATLSLSPGERATLSCRASQSVSSYLAWYQQKPGQAPRLLIYDASNRATGI
PARFSGSGS GTDFTLTISSLEPEDFAVYYCQQSSNWPRTFGQGTKVEIK

### > Seq 73: 9C4-Nivolumab IgG1-KIH-LALA C-Terminal scFv PD1 Monovalent, sAg Bivalent Bispecific 3

[0725] > Heavy Chain 2:

QIQLVQSGPELKKPGETVKISCKASGYTFTNYLLNWVKQAPGKGLKWMGW
INTYTGEPTYTDDFK GRFAFSLATSASTAYLQINNLKNEDTATYFCVRL
AGTKDYWGQGTTLTVSSASTKGPSVFPLAPS SKSTSGGTAALGCLVKDY
FPEPVTVSWNSGALTSGVHTFPAVLQSSGLYSLSSVVTVPSSSLGTQ TY
ICNVNHKPSNTKVDKKVEPKSCDKTHTCPPCPAPEAAGGPSVFLFPPKPK
DTLMISRTPEVTC VVVDVSHEDPEVKFNWYVDGVEVHNAKTKPREEQYN
STYRVVSVLTVLHQDWLNGKEYKCKVSNK ALPAPIEKTISKAKGQPREP
QVYTLPPSRDELTKNQVSLWCLVKGFYPSDIAVEWESNGQPENNY KTTP
PVLDSDGSFFLYSKLTVDKSRWQQGNVFSCSVMHEALHNHYTQKSLSLSP
GK

### > Seq 74: 9C4-Nivolumab (EpCAM-PD-1)IgG1-KIH-LALA C-Terminal scFv PD1 Monovalent, sAg Bivalent Bispecific 3

[0726] > Light Chain:

DIVMTQAAFSNPVTLGTSASISCRSSKSLLHSNGITYLYWYLQKPGQSPQ
LLIYQMSNLASGVPD RFSSSGSGTDFTLRISRVEAEDVGVYYCAQNLEL
PRTFGGGTKLEIKRTVAAPSVFIFPPSDEQL KSGTASVVCLLNNFYPRE
AKVQWKVDNALQSGNSQESVTEQDSKDSTYSLSSTLTLSKADYEKHK VY
ACEVTHQGLSSPVTKSFNRGEC

### > Seq 75: 9C4-Nivolumab IgG1-KIH-LALA C-Terminal scFv PD1 Monovalent, sAg Bivalent Bispecific 4

[0727] > Heavy Chain 1:

QIQLVQSGPELKKPGETVKISCKASGYTFTNYLLNWVKQAPGKGLKWMGW
INTYTGEPTYTDDFK GRFAFSLATSASTAYLQINNLKNEDTATYFCVRL
AGTKDYWGQGTTLTVSSASTKGPSVFPLAPS SKSTSGGTAALGCLVKDY
FPEPVTVSWNSGALTSGVHTFPAVLQSSGLYSLSSVVTVPSSSLGTQ TY
ICNVNHKPSNTKVDKKVEPKSCDKTHTCPPCPAPEAAGGPSVFLFPPKPK
DTLMISRTPEVTC VVVDVSHEDPEVKFNWYVDGVEVHNAKTKPREEQYN
STYRVVSVLTVLHQDWLNGKEYKCKVSNK ALPAPIEKTISKAKGQPREP
QVYTLPPSRDELTKNQVSLWCLVKGFYPSDIAVEWESNGQPENNY KTTP
PVLDSDGSFFLYSKLTVDKSRWQQGNVFSCSVMHEALHNHYTQKSLSLSP
GKGGGGAGGGG EIVLTQSPATLSLSPGERATLSCRASQSVSSYLAWYQQ
KPGQAPRLLIYDASNRATGIPARFSGS GSGTDFTLTISSLEPEDFAVYY
CQQSSNWPRTFGQGTKVEIKGGGGSGGGGSGGGGSQVQLVESG GGVVQP
GRSLRLDCKASGITFSNSGMHWVRQAPGKGLEWVAVIWYDGSKRYYADSV
KGRFTISRD NSKNTLFLQMNSLRAEDTAVYYCATNDDYWGQGTLVTVSS

### > Seq 76: 9C4-Nivolumab (EpCAM-PD-1)IgG1-KIH-LALA C-Terminal scFv PD1 Monovalent, sAg Bivalent Bispecific 4

[0728] > Heavy Chain 2:

QIQLVQSGPELKKPGETVKISCKASGYTFTNYLLNWVKQAPGKGLKWMGW
INTYTGEPTYTDDFK GRFAFSLATSASTAYLQINNLKNEDTATYFCVRL
AGTKDYWGQGTTLTVSSASTKGPSVFPLAPS SKSTSGGTAALGCLVKDY
FPEPVTVSWNSGALTSGVHTFPAVLQSSGLYSLSSVVTVPSSSLGTQ TY
ICNVNHKPSNTKVDKKVEPKSCDKTHTCPPCPAPEAAGGPSVFLFPPKPK
DTLMISRTPEVTC VVVDVSHEDPEVKFNWYVDGVEVHNAKTKPREEQYN
STYRVVSVLTVLHQDWLNGKEYKCKVSNK ALPAPIEKTISKAKGQPREP
QVYTLPPSRDELTKNQVSLWCLVKGFYPSDIAVEWESNGQPENNY KTTP
PVLDSDGSFFLYSKLTVDKSRWQQGNVFSCSVMHEALHNHYTQKSLSLSP
GK

### > Seq 77: 9C4-Nivolumab (EpCAM-PD-1)IgG1-KIH-LALA C-Terminal scFv PD1 Monovalent, sAg Bivalent Bispecific 4

[0729] > Light Chain:

DIVMTQAAFSNPVTLGTSASISCRSSKSLLHSNGITYLYWYLQKPGQSPQ
LLIYQMSNLASGVPD RFSSSGSGTDFTLRISRVEAEDVGVYYCAQNLEL
PRTFGGGTKLEIKRTVAAPSVFIFPPSDEQL KSGTASVVCLLNNFYPRE
AKVQWKVDNALQSGNSQESVTEQDSKDSTYSLSSTLTLSKADYEKHK VY
ACEVTHQGLSSPVTKSFNRGEC

### > Seq 78: 9C4-Nivolumab IgG1-KIH-LALA Monovalent Bispecific 1

[0730] > Heavy Chain 1:

QIQLVQSGPELKKPGETVKISCKASGYTFTNYLLNWVKQAPGKGLKWMGW
INTYTGEPTYTDDFK GRFAFSLATSASTAYLQINNLKNEDTATYFCVRL
AGTKDYWGQGTTLTVSSASTKGPSVFPLAPS SKSTSGGTAALGCLVKDY
FPEPVTVSWNSGALTSGVHTFPAVLQSSGLYSLSSVVTVPSSSLGTQ TY
ICNVNHKPSNTKVDKKVEPKSCDKTHTCPPCPAPEAAGGPSVFLFPPKPK
DTLMISRTPEVTC VVVDVSHEDPEVKFNWYVDGVEVHNAKTKPREEQYN
STYRVVSVLTVLHQDWLNGKEYKCKVSNK ALPAPIEKTISKAKGQPREP
QVYTLPPSRDELTKNQVSLWCLVKGFYPSDIAVEWESNGQPENNY KTTP
PVLDSDGSFFLYSKLTVDKSRWQQGNVFSCSVMHEALHNHYTQKSLSLSP
GK

### > Seq 79: 9C4-Nivolumab (EpCAM-PD-1)IgG1-KIH-LALA Monovalent Bispecific 1

[0731] > Heavy Chain 2:

QVQLVESGGGVVQPGRSLRLDCKASGITFSNSGMHWVRQAPGKGLEWVAV
IWYDGSKRYYADSVK GRFTISRDNSKNTLFLQMNSLRAEDTAVYYCATN
DDYWGQGTLVTVSSASTKGPSVFPLAPSSKS TSGGTAALGCLVKDYFPE
PVTVSWNSGALTSGVHTFPAVLQSSGLYSLSSVVTVPSSSLGTQTYI CN
VNHKPSNTKVDKKVEPKSCDKTHTCPPCPAPEAAGGPSVFLFPPKPKDTL
MISRTPEVTCVVV DVSHEDPEVKFNWYVDGVEVHNAKTKPREEQYNSTY
RVVSVLTVLHQDWLNGKEYKCKVSNKALP APIEKTISKAKGQPREPQVY
TLPPSRDELTKNQVSLWCLVKGFYPSDIAVEWESNGQPENNYKTT PPVL
DSDGSFFLYSKLTVDKSRWQQGNVFSCSVMHEALHNHYTQKSLSLSPGK

### > Seq 80: 9C4-Nivolumab (EpCAM-PD-1)IgG1-KIH-LALA Monovalent Bispecific 1

[0732] > Light Chain 1:

DIVMTQAAFSNPVTLGTSASISCRSSKSLLHSNGITYLYWYLQKPGQSPQ
LLIYQMSNLASGVPD RFSSSGSGTDFTLRISRVEAEDVGVYYCAQNLEL
PRTFGGGTKLEIKRTVAAPSVFIFPPSDEQL KSGTASVVCLLNNFYPRE
AKVQWKVDNALQSGNSQESVTEQDSKDSTYSLSSTLTLSKADYEKHK VY
ACEVTHQGLSSPVTKSFNRGEC

### > Seq 81: 9C4-Nivolumab (EpCAM-PD-1)IgG1-KIH-LALA Monovalent Bispecific 1

[0733] > Light Chain 2:

EIVLTQSPATLSLSPGERATLSCRASQSVSSYLAWYQQKPGQAPRLLIYD
ASNRATGIPARFSGS GSGTDFTLTISSLEPEDFAVYYCQQSSNWPRTFG
QGTKVEIKRTVAAPSVFIFPPSDEQLKSGTA SVVCLLNNFYPREAKVQW
KVDNALQSGNSQESVTEQDSKDSTYSLSSTLTLSKADYEKHKVYACE VT
HQGLSSPVTKSFNRGEC

### > Seq 82: 9C4-Nivolumab IgG1-KIH-LALA Monovalent Bispecific 2

[0734] > Heavy Chain 1:

QIQLVQSGPELKKPGETVKISCKASGYTFTNYLLNWVKQAPGKGLKWMGW
INTYTGEPTYTDDFK GRFAFSLATSASTAYLQINNLKNEDTATYFCVRL
AGTKDYWGQGTTLTVSSASTKGPSVFPLAPS SKSTSGGTAALGCLVKDY
FPEPVTVSWNSGALTSGVHTFPAVLQSSGLYSLSSVVTVPSSSLGTQ TY
ICNVNHKPSNTKVDKKVEPKSCDKTHTCPPCPAPEAAGGPSVFLFPPKPK
DTLMISRTPEVTC VVVDVSHEDPEVKFNWYVDGVEVHNAKTKPREEQYN
STYRVVSVLTVLHQDWLNGKEYKCKVSNK ALPAPIEKTISKAKGQPREP
QVYTLPPSRDELTKNQVSLWCLVKGFYPSDIAVEWESNGQPENNY KTTP
PVLDSDGSFFLYSKLTVDKSRWQQGNVFSCSVMHEALHNHYTQKSLSLSP
GK

### > Seq 83: 9C4-Nivolumab (EpCAM-PD-1)IgG1-KIH-LALA Monovalent Bispecific 2

[0735] > Heavy Chain 2:

QVQLVESGGGVVQPGRSLRLDCKASGITFSNSGMHWVRQAPGKGLEWVA
VIWYDGSKRYYADSVK GRFTISRDNSKNTLFLQMNSLRAEDTAVYYCAT
NDDYWGQGTLVTVSSASTKGPSVFPLAPSSKS TSGGTAALGCLVKDYFP
EPVTVSWNSGALTSGVHTFPAVLQSSGLYSLSSVVTVPSSSLGTQTYI C
NVNHKPSNTKVDKKVEPKSCDKTHTCPPCPAPEAAGGPSVFLFPPKPKDT
LMISRTPEVTCVVV DVSHEDPEVKFNWYVDGVEVHNAKTKPREEQYNST
YRVVSVLTVLHQDWLNGKEYKCKVSNKALP APIEKTISKAKGQPREPQV
YTLPPSRDELTKNQVSLWCLVKGFYPSDIAVEWESNGQPENNYKTT PPV
LDSDGSFFLYSKLTVDKSRWQQGNVFSCSVMHEALHNHYTQKSLSLSPGK

### > Seq 84: 9C4-Nivolumab (EpCAM-PD-1)IgG1-KIH-LALA Monovalent Bispecific 2

[0736] > Light Chain 1:

DIVMTQAAFSNPVTLGTSASISCRSSKSLLHSNGITYLYWYLQKPGQSPQ
LLIYQMSNLASGVPD RFSSSGSGTDFTLRISRVEAEDVGVYYCAQNLEL
PRTFGGGTKLEIKRTVAAPSVFIFPPSDEQL KSGTASVVCLLNNFYPRE
AKVQWKVDNALQSGNSQESVTEQDSKDSTYSLSSTLTLSKADYEKHK VY
ACEVTHQGLSSPVTKSFNRGEC

### > Seq 85: 9C4-Nivolumab (EpCAM-PD-1)IgG1-KIH-LALA Monovalent Bispecific 2

[0737] > Light Chain 2:

EIVLTQSPATLSLSPGERATLSCRASQSVSSYLAWYQQKPGQAPRLLIYD
ASNRATGIPARFSGS GSGTDFTLTISSLEPEDFAVYYCQQSSNWPRTFG
QGTKVEIKRTVAAPSVFIFPPSDEQLKSGTA SVVCLLNNFYPREAKVQW
KVDNALQSGNSQESVTEQDSKDSTYSLSSTLTLSKADYEKHKVYACE VT
HQGLSSPVTKSFNRGEC

### > Seq 86: MOC31-Pembrolizumab (EpCAM-PD-1)IgG4-SPLE C-Terminal scFv Bivalent Bispecific sAg-PD-1 scFv Orientation 1

[0738] > Heavy Chain:

QVKLQQSGPELKKPGETVKISCKASGYTFTNYGMNWVKQAPGKGLKWMGW
INTYTGESTYADDFK GRFAFSLETSASAAYLQINNLKNEDTATYFCARF
AIKGDYWGQGTTVTVSSASTKGPSVFPLAPC SRSTSESTAALGCLVKDY
FPEPVTVSWNSGALTSGVHTFPAVLQSSGLYSLSSVVTVPSSSLGTK TY
TCNVDHKPSNTKVDKRVESKYGPPCPSCPAPEFLGGPSVFLFPPKPKDTL
MISRTPEVTCVVV DVSQEDPEVQFNWYVDGVEVHNAKTKPREEQFNSTY
RVVSVLTVLHQDWLNGKEYKCKVSNKGLP SSIEKTISKAKGQPREPQVY
TLPPSQEEMTKNQVSLTCLVKGFYPSDIAVEWESNGQPENNYKTT PPVL
DSDGSFFLYSRLTVDKSRWQEGNVFSCSVMHEALHNHYTQKSLSLSLGKG
GGGAGGGGQVQ LVQSGVEVKKPGASVKVSCKASGYTFTNYYMYWVRQAP
GQGLEWMJIGGINPSNGGTNFNEKFKNRV TLTTDSSTTTAYMELKSLQF
DDTAVYYCARRDYRFDMGFDYWGQGTTVTVSSGGGGSGGGGSGGG GSEI
VLTQSPATLSLSPGERATLSCRASKGVSTSGYSYLHWYQQKPGQAPRLLI
YLASYLESGVP ARFSGSGSGTDFTLTISSLEPEDFAVYYCQHSRDLPLT
FGGGTKVEIK

### > Seq 87: MOC31-Pembrolizumab (EpCAM-PD-1)IgG4-SPLE C-Terminal scFv Bivalent Bispecific sAg-PD-1 scFv Orientation 1

[0739] > Light Chain:

DIVLTQSPFSNPVTLGTSASISCRSTKSLLHSNGITYLYWYLQKPGQSPQ
LLIYQMSNLASGVPD RFSSSGSGTDFTLRISRVEAEDVGVYYCAQNLEI
PRTFGGGTKLEIKRTVAAPSVFIFPPSDEQL KSGTASVVCLLNNFYPRE
AKVQWKVDNALQSGNSQESVTEQDSKDSTYSLSSTLTLSKADYEKHK VY
ACEVTHQGLSSPVTKSFNRGEC

### > Seq 88: MOC31-Pembrolizumab IgG4-SPLE C-Terminal scFv Bivalent Bispecific sAg-PD-1 scFv Orientation 2

[0740] > Heavy Chain:

QVKLQQSGPELKKPGETVKISCKASGYTFTNYGMNWVKQAPGKGLKWMGW
INTYTGESTYADDFK GRFAFSLETSASAAYLQINNLKNEDTATYFCARF
AIKGDYWGQGTTVTVSSASTKGPSVFPLAPC SRSTSESTAALGCLVKDY
FPEPVTVSWNSGALTSGVHTFPAVLQSSGLYSLSSVVTVPSSSLGTK TY
TCNVDHKPSNTKVDKRVESKYGPPCPSCPAPEFLGGPSVFLFPPKPKDTL
MISRTPEVTCVVV DVSQEDPEVQFNWYVDGVEVHNAKTKPREEQFNSTY
RVVSVLTVLHQDWLNGKEYKCKVSNKGLP SSIEKTISKAKGQPREPQVY
TLPPSQEEMTKNQVSLTCLVKGFYPSDIAVEWESNGQPENNYKTT PPVL
DSDGSFFLYSRLTVDKSRWQEGNVFSCSVMHEALHNHYTQKSLSLSLGKG
GGGAGGGGEIV LTQSPATLSLSPGERATLSCRASKGVSTSGYSYLHWYQ
QKPGQAPRLLIYLASYLESGVPARFSG SGSGTDFTLTISSLEPEDFAVY
YCQHSRDLPLTFGGGTKVEIKGGGGSGGGGSGGGGSQVQLVQS GVEVKK
PGASVKVSCKASGYTFTNYYMYWVRQAPGQGLEWMGGINPSNGGTNFNEK
FKNRVTLTT DSSTTTAYMELKSLQFDDTAVYYCARRDYRFDMGFDYWGQ
GTTVTVSS

### > Seq 89: MOC31-Pembrolizumab (EpCAM-PD-1)IgG4-SPLE C-Terminal scFv Bivalent Bispecific sAg-PD-1 scFv Orientation 2

[0741] > Light Chain:

DIVLTQSPFSNPVTLGTSASISCRSTKSLLHSNGITYLYWYLQKPGQSPQ
LLIYQMSNLASGVPD RFSSSGSGTDFTLRISRVEAEDVGVYYCAQNLEI
PRTFGGGTKLEIKRTVAAPSVFIFPPSDEQL KSGTASVVCLLNNFYPRE
AKVQWKVDNALQSGNSQESVTEQDSKDSTYSLSSTLTLSKADYEKHK VY
ACEVTHQGLSSPVTKSFNRGEC

### > Seq 90: MOC31-Pembrolizumab IgG4-SPLE C-Terminal scFv Bivalent Bispecific PD-1-sAg scFv Orientation 1

[0742] > Heavy Chain:

QVQLVQSGVEVKKPGASVKVSCKASGYTFTNYYMYWVRQAPGQGLEWMGG
INPSNGGTNFNEKFK NRVTLTTDSSTTTAYMELKSLQFDDTAVYYCARR
DYRFDMGFDYWGQGTTVTVSSASTKGPSVFP LAPCSRSTSESTAALGCL
VKDYFPEPVTVSWNSGALTSGVHTFPAVLQSSGLYSLSSVVTVPSSS LG
TKTYTCNVDHKPSNTKVDKRVESKYGPPCPSCPAPEFLGGPSVFLFPPKP
KDTLMISRTPEVT CVVVDVSQEDPEVQFNWYVDGVEVHNAKTKPREEQF
NSTYRVVSVLTVLHQDWLNGKEYKCKVSN KGLPSSIEKTISKAKGQPRE
PQVYTLPPSQEEMTKNQVSLTCLVKGFYPSDIAVEWESNGQPENN YKTT
PPVLDSDGSFFLYSRLTVDKSRWQEGNVFSCSVMHEALHNHYTQKSLSLS
LGKGGGGAGGG GQVKLQQSGPELKKPGETVKISCKASGYTFTNYGMNWV
KQAPGKGLKWMGWINTYTGESTYADDF KGRFAFSLETSASAAYLQINNL
KNEDTATYFCARFAIKGDYWGQGTTVTVSSGGGGSGGGGSGGG GSDIVL
TQSPFSNPVTLGTSASISCRSTKSLLHSNGITYLYWYLQKPGQSPQLLIY
QMSNLASGV PDRFSSSGSGTDFTLRISRVEAEDVGVYYCAQNLEIPRTF
GGGTKLEIK

### > Seq 91: MOC31-Pembrolizumab (EpCAM-PD-1)IgG4-SPLE C-Terminal scFv Bivalent Bispecific PD-1-sAg scFv Orientation 1

[0743] > Light Chain:

EIVLTQSPATLSLSPGERATLSCRASKGVSTSGYSYLHWYQQKPGQAPRL
LIYLASYLESGVPAR FSGSGSGTDFTLTISSLEPEDFAVYYCQHSRDLP
LTFGGGTKVEIKRTVAAPSVFIFPPSDEQLK SGTASVVCLLNNFYPREA
KVQWKVDNALQSGNSQESVTEQDSKDSTYSLSSTLTLSKADYEKHKV YA
CEVTHQGLSSPVTKSFNRGEC

### > Seq 92: MOC31-Pembrolizumab IgG4-SPLE C-Terminal scFv Bivalent Bispecific PD1-sAg scFv Orientation 2

[0744] > Heavy Chain:

QVQLVQSGVEVKKPGASVKVSCKASGYTFTNYYMYWVRQAPGQGLEWMGG
INPSNGGTNFNEKFK NRVTLTTDSSTTTAYMELKSLQFDDTAVYYCARR
DYRFDMGFDYWGQGTTVTVSSASTKGPSVFP LAPCSRSTSESTAALGCL
VKDYFPEPVTVSWNSGALTSGVHTFPAVLQSSGLYSLSSVVTVPSSS LG
TKTYTCNVDHKPSNTKVDKRVESKYGPPCPSCPAPEFLGGPSVFLFPPKP
KDTLMISRTPEVT CVVVDVSQEDPEVQFNWYVDGVEVHNAKTKPREEQF
NSTYRVVSVLTVLHQDWLNGKEYKCKVSN KGLPSSIEKTISKAKGQPRE
PQVYTLPPSQEEMTKNQVSLTCLVKGFYPSDIAVEWESNGQPENN YKTT
PPVLDSDGSFFLYSRLTVDKSRWQEGNVFSCSVMHEALHNHYTQKSLSLS
LGKGGGGAGGG GDIVLTQSPFSNPVTLGTSASISCRSTKSLLHSNGITY
LYWYLQKPGQSPQLLIYQMSNLASGVP DRFSSSGSGTDFTLRISRVEAE
DVGVYYCAQNLEIPRTFGGGTKLEIKGGGGSGGGGSGGGGSQV KLQQSG
PELKKPGETVKISCKASGYTFTNYGMNWVKQAPGKGLKWMGWINTYTGES
TYADDFKGR FAFSLETSASAAYLQINNLKNEDTATYFCARFAIKGDYWG
QGTTVTVSS

### > Seq 93: MOC31-Pembrolizumab (EpCAM-PD-1)IgG4-SPLE C-Terminal scFv Bivalent Bispecific PD1-sAg scFv Orientation 2

[0745] > Light Chain:

EIVLTQSPATLSLSPGERATLSCRASKGVSTSGYSYLHWYQQKPGQAPRL
LIYLASYLESGVPAR FSGSGSGTDFTLTISSLEPEDFAVYYCQHSRDLP
LTFGGGTKVEIKRTVAAPSVFIFPPSDEQLK SGTASVVCLLNNFYPREA
KVQWKVDNALQSGNSQESVTEQDSKDSTYSLSSTLTLSKADYEKHKV YA
CEVTHQGLSSPVTKSFNRGEC

### > Seq 94: MOC31-Pembrolizumab IgG1-KIH-LALA C-Terminal scFv PD1 Monovalent, sAg Bivalent Bispecific 1

[0746] > Heavy Chain 1:

QVKLQQSGPELKKPGETVKISCKASGYTFTNYGMNWVKQAPGKGLKWMGW
INTYTGESTYADDFK GRFAFSLETSASAAYLQINNLKNEDTATYFCARF
AIKGDYWGQGTTVTVSSASTKGPSVFPLAPS SKSTSGGTAALGCLVKDY
FPEPVTVSWNSGALTSGVHTFPAVLQSSGLYSLSSVVTVPSSSLGTQ TY
ICNVNHKPSNTKVDKKVEPKSCDKTHTCPPCPAPEAAGGPSVFLFPPKPK
DTLMISRTPEVTC VVVDVSHEDPEVKFNWYVDGVEVHNAKTKPREEQYN
STYRVVSVLTVLHQDWLNGKEYKCKVSNK ALPAPIEKTISKAKGQPREP
QVYTLPPSRDELTKNQVSLWCLVKGFYPSDIAVEWESNGQPENNY KTTP
PVLDSDGSFFLYSKLTVDKSRWQQGNVFSCSVMHEALHNHYTQKSLSLSP
GKGGGGAGGGG QVQLVQSGVEVKKPGASVKVSCKASGYTFTNYYMYWVR
QAPGQGLEWMGGINPSNGGTNFNEKFK NRVTLTTDSSTTTAYMELKSLQ
FDDTAVYYCARRDYRFDMGFDYWGQGTTVTVSSGGGGSGGGGS GGGGSE
IVLTQSPATLSLSPGERATLSCRASKGVSTSGYSYLHWYQQKPGQAPRLL
IYLASYLES GVPARFSGSGSGTDFTLTISSLEPEDFAVYYCQHSRDLPL
TFGGGTKVEIK

### > Seq 95: MOC31-Pembrolizumab IgG1-KIH-LALA C-Terminal scFv PD1 Monovalent, sAg Bivalent Bispecific 1

[0747] > Heavy Chain 2:

QVKLQQSGPELKKPGETVKISCKASGYTFTNYGMNWVKQAPGKGLKWMGW
INTYTGESTYADDFK GRFAFSLETSASAAYLQINNLKNEDTATYFCARF
AIKGDYWGQGTTVTVSSASTKGPSVFPLAPS SKSTSGGTAALGCLVKDY
FPEPVTVSWNSGALTSGVHTFPAVLQSSGLYSLSSVVTVPSSSLGTQ TY
ICNVNHKPSNTKVDKKVEPKSCDKTHTCPPCPAPEAAGGPSVFLFPPKPK
DTLMISRTPEVTC VVVDVSHEDPEVKFNWYVDGVEVHNAKTKPREEQYN
STYRVVSVLTVLHQDWLNGKEYKCKVSNK ALPAPIEKTISKAKGQPREP
QVYTLPPSRDELTKNQVSLWCLVKGFYPSDIAVEWESNGQPENNY KTTP
PVLDSDGSFFLYSKLTVDKSRWQQGNVFSCSVMHEALHNHYTQKSLSLSP
GK

### > Seq 96: MOC31-Pembrolizumab (EpCAM-PD-1)IgG1-KIH-LALA C-Terminal scFv PD1 Monovalent, sAg Bivalent Bispecific 1

[0748] > Light Chain:

DIVLTQSPFSNPVTLGTSASISCRSTKSLLHSNGITYLYWYLQKPGQSPQ
LLIYQMSNLASGVPD RFSSSGSGTDFTLRISRVEAEDVGVYYCAQNLEI
PRTFGGGTKLEIKRTVAAPSVFIFPPSDEQL KSGTASVVCLLNNFYPRE
AKVQWKVDNALQSGNSQESVTEQDSKDSTYSLSSTLTLSKADYEKHK VY
ACEVTHQGLSSPVTKSFNRGEC

### > Seq 97: MOC31-Pembrolizumab IgG1-KIH-LALA C-Terminal scFv PD1 Monovalent, sAg Bivalent Bispecific 2

[0749] > Heavy Chain 1:

QVKLQQSGPELKKPGETVKISCKASGYTFTNYGMNWVKQAPGKGLKWMGW
INTYTGESTYADDFK GRFAFSLETSASAAYLQINNLKNEDTATYFCARF
AIKGDYWGQGTTVTVSSASTKGPSVFPLAPS SKSTSGGTAALGCLVKDY
FPEPVTVSWNSGALTSGVHTFPAVLQSSGLYSLSSVVTVPSSSLGTQ TY
ICNVNHKPSNTKVDKKVEPKSCDKTHTCPPCPAPEAAGGPSVFLFPPKPK
DTLMISRTPEVTC VVVDVSHEDPEVKFNWYVDGVEVHNAKTKPREEQYN
STYRVVSVLTVLHQDWLNGKEYKCKVSNK ALPAPIEKTISKAKGQPREP
QVYTLPPSRDELTKNQVSLWCLVKGFYPSDIAVEWESNGQPENNY KTTP
PVLDSDGSFFLYSKLTVDKSRWQQGNVFSCSVMHEALHNHYTQKSLSLSP
GKGGGGAGGGG EIVLTQSPATLSLSPGERATLSCRASKGVSTSGYSYLH
WYQQKPGQAPRLLIYLASYLESGVPAR FSGSGSGTDFTLTISSLEPEDF
AVYYCQHSRDLPLTFGGGTKVEIKGGGGSGGGGSGGGGSQVQL VQSGVE
VKKPGASVKVSCKASGYTFTNYYMYWVRQAPGQGLEWMGGINPSNGGTNF
NEKFKNRVT LTTDSSTTTAYMELKSLQFDDTAVYYCARRDYRFDMGFDY
WGQGTTVTVSS

### > Seq 97: MOC31-Pembrolizumab IgG1-KIH-LALA C-Terminal scFv PD1 Monovalent, sAg Bivalent Bispecific 2

[0750] > Heavy Chain 2:

QVKLQQSGPELKKPGETVKISCKASGYTFTNYGMNWVKQAPGKGLKWMGW
INTYTGESTYADDFK GRFAFSLETSASAAYLQINNLKNEDTATYFCARF
AIKGDYWGQGTTVTVSSASTKGPSVFPLAPS SKSTSGGTAALGCLVKDY
FPEPVTVSWNSGALTSGVHTFPAVLQSSGLYSLSSVVTVPSSSLGTQ TY
ICNVNHKPSNTKVDKKVEPKSCDKTHTCPPCPAPEAAGGPSVFLFPPKPK
DTLMISRTPEVTC VVVDVSHEDPEVKFNWYVDGVEVHNAKTKPREEQYN
STYRVVSVLTVLHQDWLNGKEYKCKVSNK ALPAPIEKTISKAKGQPREP
QVYTLPPSRDELTKNQVSLWCLVKGFYPSDIAVEWESNGQPENNY KTTP
PVLDSDGSFFLYSKLTVDKSRWQQGNVFSCSVMHEALHNHYTQKSLSLSP
GK

### > Seq 98: MOC31-Pembrolizumab (EpCAM-PD-1)IgG1-KIH-LALA C-Terminal scFv PD1 Monovalent, sAg Bivalent Bispecific 2

[0751] > Light Chain:

DIVLTQSPFSNPVTLGTSASISCRSTKSLLHSNGITYLYWYLQKPGQSPQ
LLIYQMSNLASGVPD RFSSSGSGTDFTLRISRVEAEDVGVYYCAQNLEI
PRTFGGGTKLEIKRTVAAPSVFIFPPSDEQL KSGTASVVCLLNNFYPRE
AKVQWKVDNALQSGNSQESVTEQDSKDSTYSLSSTLTLSKADYEKHK VY
ACEVTHQGLSSPVTKSFNRGEC

### > Seq 99: MOC31-Pembrolizumab IgG1-KIH-LALA C-Terminal scFv PD1 Monovalent, sAg Bivalent Bispecific 3

[0752] > Heavy Chain 1:

QVKLQQSGPELKKPGETVKISCKASGYTFTNYGMNWVKQAPGKGLKWMGW
INTYTGESTYADDFK GRFAFSLETSASAAYLQINNLKNEDTATYFCARF
AIKGDYWGQGTTVTVSSASTKGPSVFPLAPS SKSTSGGTAALGCLVKDY
FPEPVTVSWNSGALTSGVHTFPAVLQSSGLYSLSSVVTVPSSSLGTQ TY
ICNVNHKPSNTKVDKKVEPKSCDKTHTCPPCPAPEAAGGPSVFLFPPKPK
DTLMISRTPEVTC VVVDVSHEDPEVKFNWYVDGVEVHNAKTKPREEQYN
STYRVVSVLTVLHQDWLNGKEYKCKVSNK ALPAPIEKTISKAKGQPREP
QVYTLPPSRDELTKNQVSLWCLVKGFYPSDIAVEWESNGQPENNY KTTP
PVLDSDGSFFLYSKLTVDKSRWQQGNVFSCSVMHEALHNHYTQKSLSLSP
GKGGGGAGGGG QVQLVQSGVEVKKPGASVKVSCKASGYTFTNYYMYWVR
QAPGQGLEWMGGINPSNGGTNFNEKFK NRVTLTTDSSTTTAYMELKSLQ
FDDTAVYYCARRDYRFDMGFDYWGQGTTVTVSSGGGGSGGGGS GGGGSE
IVLTQSPATLSLSPGERATLSCRASKGVSTSGYSYLHWYQQKPGQAPRLL
IYLASYLES GVPARFSGSGSGTDFTLTISSLEPEDFAVYYCQHSRDLPL
TFGGGTKVEIK

### > Seq 100: MOC31-Pembrolizumab IgG1-KIH-LALA C-Terminal scFv PD1 Monovalent, sAg Bivalent Bispecific 3

[0753] > Heavy Chain 2:

QVKLQQSGPELKKPGETVKISCKASGYTFTNYGMNWVKQAPGKGLKWMGW
INTYTGESTYADDFK GRFAFSLETSASAAYLQINNLKNEDTATYFCARF
AIKGDYWGQGTTVTVSSASTKGPSVFPLAPS SKSTSGGTAALGCLVKDY
FPEPVTVSWNSGALTSGVHTFPAVLQSSGLYSLSSVVTVPSSSLGTQ TY
ICNVNHKPSNTKVDKKVEPKSCDKTHTCPPCPAPEAAGGPSVFLFPPKPK
DTLMISRTPEVTC VVVDVSHEDPEVKFNWYVDGVEVHNAKTKPREEQYN
STYRVVSVLTVLHQDWLNGKEYKCKVSNK ALPAPIEKTISKAKGQPREP
QVYTLPPSRDELTKNQVSLWCLVKGFYPSDIAVEWESNGQPENNY KTTP
PVLDSDGSFFLYSKLTVDKSRWQQGNVFSCSVMHEALHNHYTQKSLSLSP
GK

### > Seq 101: MOC31-Pembrolizumab (EpCAM-PD-1)IgG1-KIH-LALA C-Terminal scFv PD1 Monovalent, sAg Bivalent Bispecific 3

[0754] > Light Chain:

DIVLTQSPFSNPVTLGTSASISCRSTKSLLHSNGITYLYWYLQKPGQSPQ
LLIYQMSNLASGVPD RFSSSGSGTDFTLRISRVEAEDVGVYYCAQNLEI
PRTFGGGTKLEIKRTVAAPSVFIFPPSDEQL KSGTASVVCLLNNFYPRE
AKVQWKVDNALQSGNSQESVTEQDSKDSTYSLSSTLTLSKADYEKHK VY
ACEVTHQGLSSPVTKSFNRGEC

### > Seq 102: MOC31-Pembrolizumab IgG1-KIH-LALA C-Terminal scFv PD1 Monovalent, sAg Bivalent Bispecific 4

[0755] > Heavy Chain 1:

QVKLQQSGPELKKPGETVKISCKASGYTFTNYGMNWVKQAPGKGLKWMGW
INTYTGESTYADDFK GRFAFSLETSASAAYLQINNLKNEDTATYFCARF
AIKGDYWGQGTTVTVSSASTKGPSVFPLAPS SKSTSGGTAALGCLVKDY
FPEPVTVSWNSGALTSGVHTFPAVLQSSGLYSLSSVVTVPSSSLGTQ TY
ICNVNHKPSNTKVDKKVEPKSCDKTHTCPPCPAPEAAGGPSVFLFPPKPK
DTLMISRTPEVTC VVVDVSHEDPEVKFNWYVDGVEVHNAKTKPREEQYN
STYRVVSVLTVLHQDWLNGKEYKCKVSNK ALPAPIEKTISKAKGQPREP
QVYTLPPSRDELTKNQVSLWCLVKGFYPSDIAVEWESNGQPENNY KTTP
PVLDSDGSFFLYSKLTVDKSRWQQGNVFSCSVMHEALHNHYTQKSLSLSP
GKGGGGAGGGG EIVLTQSPATLSLSPGERATLSCRASKGVSTSGYSYLH
WYQQKPGQAPRLLIYLASYLESGVPAR FSGSGSGTDFTLTISSLEPEDF
AVYYCQHSRDLPLTFGGGTKVEIKGGGGSGGGGSGGGGSQVQL VQSGVE
VKKPGASVKVSCKASGYTFTNYYMYWVRQAPGQGLEWMGGINPSNGGTNF
NEKFKNRVT LTTDSSTTTAYMELKSLQFDDTAVYYCARRDYRFDMGFDY
WGQGTTVTVSS

### > Seq 103: MOC31-Pembrolizumab (EpCAM-PD-1)IgG1-KIH-LALA C-Terminal scFv PD1 Monovalent, sAg Bivalent Bispecific 4

[0756] > Heavy Chain 2:

QVKLQQSGPELKKPGETVKISCKASGYTFTNYGMNWVKQAPGKGLKWMGW
INTYTGESTYADDFK GRFAFSLETSASAAYLQINNLKNEDTATYFCARF
AIKGDYWGQGTTVTVSSASTKGPSVFPLAPS SKSTSGGTAALGCLVKDY
FPEPVTVSWNSGALTSGVHTFPAVLQSSGLYSLSSVVTVPSSSLGTQ TY
ICNVNHKPSNTKVDKKVEPKSCDKTHTCPPCPAPEAAGGPSVFLFPPKPK
DTLMISRTPEVTC VVVDVSHEDPEVKFNWYVDGVEVHNAKTKPREEQYN
STYRVVSVLTVLHQDWLNGKEYKCKVSNK ALPAPIEKTISKAKGQPREP
QVYTLPPSRDELTKNQVSLWCLVKGFYPSDIAVEWESNGQPENNY KTTP
PVLDSDGSFFLYSKLTVDKSRWQQGNVFSCSVMHEALHNHYTQKSLSLSP
GK

### > Seq 104: MOC31-Pembrolizumab (EpCAM-PD-1)IgG1-KIH-LALA C-Terminal scFv PD1 Monovalent, sAg Bivalent Bispecific 4

[0757] > Light Chain:

DIVLTQSPFSNPVTLGTSASISCRSTKSLLHSNGITYLYWYLQKPGQSPQ
LLIYQMSNLASGVPD RFSSSGSGTDFTLRISRVEAEDVGVYYCAQNLEI
PRTFGGGTKLEIKRTVAAPSVFIFPPSDEQL KSGTASVVCLLNNFYPRE
AKVQWKVDNALQSGNSQESVTEQDSKDSTYSLSSTLTLSKADYEKHK VY
ACEVTHQGLSSPVTKSFNRGEC

### > Seq 105: MOC31-Pembrolizumab IgG1-KIH-LALA Monovalent Bispecific 1

[0758] > Heavy Chain 1:

QVKLQQSGPELKKPGETVKISCKASGYTFTNYGMNWVKQAPGKGLKWMGW
INTYTGESTYADDFK GRFAFSLETSASAAYLQINNLKNEDTATYFCARF
AIKGDYWGQGTTVTVSSASTKGPSVFPLAPS SKSTSGGTAALGCLVKDY
FPEPVTVSWNSGALTSGVHTFPAVLQSSGLYSLSSVVTVPSSSLGTQ TY
ICNVNHKPSNTKVDKKVEPKSCDKTHTCPPCPAPEAAGGPSVFLFPPKPK
DTLMISRTPEVTC VVVDVSHEDPEVKFNWYVDGVEVHNAKTKPREEQYN
STYRVVSVLTVLHQDWLNGKEYKCKVSNK ALPAPIEKTISKAKGQPREP
QVYTLPPSRDELTKNQVSLWCLVKGFYPSDIAVEWESNGQPENNY KTTP
PVLDSDGSFFLYSKLTVDKSRWQQGNVFSCSVMHEALHNHYTQKSLSLSP
GK

### > Seq 106: MOC31-Pembrolizumab (EpCAM-PD-1)IgG1-KIH-LALA Monovalent Bispecific 1

[0759] > Heavy Chain 2:

QVQLVQSGVEVKKPGASVKVSCKASGYTFTNYYMYWVRQAPGQGLEWMGG
INPSNGGTNFNEKFK NRVTLTTDSSTTTAYMELKSLQFDDTAVYYCARR
DYRFDMGFDYWGQGTTVTVSSASTKGPSVFP LAPSSKSTSGGTAALGCL
VKDYFPEPVTVSWNSGALTSGVHTFPAVLQSSGLYSLSSVVTVPSSS LG
TQTYICNVNHKPSNTKVDKKVEPKSCDKTHTCPPCPAPEAAGGPSVFLFP
PKPKDTLMISRTP EVTCVVVDVSHEDPEVKFNWYVDGVEVHNAKTKPRE
EQYNSTYRVVSVLTVLHQDWLNGKEYKCK VSNKALPAPIEKTISKAKGQ
PREPQVYTLPPSRDELTKNQVSLWCLVKGFYPSDIAVEWESNGQP ENNY
KTTPPVLDSDGSFFLYSKLTVDKSRWQQGNVFSCSVMHEALHNHYTQKSL
SLSPGK

### > Seq 107: MOC31-Pembrolizumab (EpCAM-PD-1)IgG1-KIH-LALA Monovalent Bispecific 1

[0760] > Light Chain 1:

DIVLTQSPFSNPVTLGTSASISCRSTKSLLHSNGITYLYWYLQKPGQSPQ
LLIYQMSNLASGVPD RFSSSGSGTDFTLRISRVEAEDVGVYYCAQNLEI
PRTFGGGTKLEIKRTVAAPSVFIFPPSDEQL KSGTASVVCLLNNFYPRE
AKVQWKVDNALQSGNSQESVTEQDSKDSTYSLSSTLTLSKADYEKHK VY
ACEVTHQGLSSPVTKSFNRGEC

### > Seq 108: MOC31-Pembrolizumab (EpCAM-PD-1)IgG1-KIH-LALA Monovalent Bispecific 1

[0761] > Light Chain 2:

EIVLTQSPATLSLSPGERATLSCRASKGVSTSGYSYLHWYQQKPGQAPRL
LIYLASYLESGVPAR FSGSGSGTDFTLTISSLEPEDFAVYYCQHSRDLP
LTFGGGTKVEIKRTVAAPSVFIFPPSDEQLK SGTASVVCLLNNFYPREA
KVQWKVDNALQSGNSQESVTEQDSKDSTYSLSSTLTLSKADYEKHKV YA
CEVTHQGLSSPVTKSFNRGEC

### > Seq 109: MOC31-Pembrolizumab IgG1-KIH-LALA Monovalent Bispecific 2

[0762] > Heavy Chain 1:

QVKLQQSGPELKKPGETVKISCKASGYTFTNYGMNWVKQAPGKGLKWMGW
INTYTGESTYADDFK GRFAFSLETSASAAYLQINNLKNEDTATYFCARF
AIKGDYWGQGTTVTVSSASTKGPSVFPLAPS SKSTSGGTAALGCLVKDY
FPEPVTVSWNSGALTSGVHTFPAVLQSSGLYSLSSVVTVPSSSLGTQ TY
ICNVNHKPSNTKVDKKVEPKSCDKTHTCPPCPAPEAAGGPSVFLFPPKPK
DTLMISRTPEVTC VVVDVSHEDPEVKFNWYVDGVEVHNAKTKPREEQYN
STYRVVSVLTVLHQDWLNGKEYKCKVSNK ALPAPIEKTISKAKGQPREP
QVYTLPPSRDELTKNQVSLWCLVKGFYPSDIAVEWESNGQPENNY KTTP
PVLDSDGSFFLYSKLTVDKSRWQQGNVFSCSVMHEALHNHYTQKSLSLSP
GK

### > Seq 110: MOC31-Pembrolizumab (EpCAM-PD-1)IgG1-KIH-LALA Monovalent Bispecific 2

[0763] > Heavy Chain 2:

QVQLVQSGVEVKKPGASVKVSCKASGYTFTNYYMYWVRQAPGQGLEWMGG
INPSNGGTNFNEKFK NRVTLTTDSSTTTAYMELKSLQFDDTAVYYCARR
DYRFDMGFDYWGQGTTVTVSSASTKGPSVFP LAPSSKSTSGGTAALGCL
VKDYFPEPVTVSWNSGALTSGVHTFPAVLQSSGLYSLSSVVTVPSSS LG
TQTYICNVNHKPSNTKVDKKVEPKSCDKTHTCPPCPAPEAAGGPSVFLFP
PKPKDTLMISRTP EVTCVVVDVSHEDPEVKFNWYVDGVEVHNAKTKPRE
EQYNSTYRVVSVLTVLHQDWLNGKEYKCK VSNKALPAPIEKTISKAKGQ
PREPQVYTLPPSRDELTKNQVSLWCLVKGFYPSDIAVEWESNGQP ENNY
KTTPPVLDSDGSFFLYSKLTVDKSRWQQGNVFSCSVMHEALHNHYTQKSL
SLSPGK

### > Seq 111: MOC31-Pembrolizumab (EpCAM-PD-1)IgG1-KIH-LALA Monovalent Bispecific 2

[0764] > Light Chain 1:

DIVLTQSPFSNPVTLGTSASISCRSTKSLLHSNGITYLYWYLQKPGQSPQ
LLIYQMSNLASGVPD RFSSSGSGTDFTLRISRVEAEDVGVYYCAQNLEI
PRTFGGGTKLEIKRTVAAPSVFIFPPSDEQL KSGTASVVCLLNNFYPRE
AKVQWKVDNALQSGNSQESVTEQDSKDSTYSLSSTLTLSKADYEKHK VY
ACEVTHQGLSSPVTKSFNRGEC

### > Seq 112: MOC31-Pembrolizumab (EpCAM-PD-1)IgG1-KIH-LALA Monovalent Bispecific 2

[0765] > Light Chain 2:

EIVLTQSPATLSLSPGERATLSCRASKGVSTSGYSYLHWYQQKPGQAPRL
LIYLASYLESGVPAR FSGSGSGTDFTLTISSLEPEDFAVYYCQHSRDLP
LTFGGGTKVEIKRTVAAPSVFIFPPSDEQLK SGTASVVCLLNNFYPREA
KVQWKVDNALQSGNSQESVTEQDSKDSTYSLSSTLTLSKADYEKHKV YA
CEVTHQGLSSPVTKSFNRGEC

### > Seq 113: MOC31-Nivolumab (EpCAM-PD-1)IgG4-SPLE C-Terminal scFv Bivalent Bispecific sAg-PD-1 scFv Orientation 1

[0766] > Heavy Chain:

QVKLQQSGPELKKPGETVKISCKASGYTFTNYGMNWVKQAPGKGLKWMGW
INTYTGESTYADDFK GRFAFSLETSASAAYLQINNLKNEDTATYFCARF
AIKGDYWGQGTTVTVSSASTKGPSVFPLAPC SRSTSESTAALGCLVKDY
FPEPVTVSWNSGALTSGVHTFPAVLQSSGLYSLSSVVTVPSSSLGTK TY
TCNVDHKPSNTKVDKRVESKYGPPCPSCPAPEFLGGPSVFLFPPKPKDTL
MISRTPEVTCVVV DVSQEDPEVQFNWYVDGVEVHNAKTKPREEQFNSTY
RVVSVLTVLHQDWLNGKEYKCKVSNKGLP SSIEKTISKAKGQPREPQVY
TLPPSQEEMTKNQVSLTCLVKGFYPSDIAVEWESNGQPENNYKTT PPVL
DSDGSFFLYSRLTVDKSRWQEGNVFSCSVMHEALHNHYTQKSLSLSLGKG
GGGAGGGGQVQ LVESGGGVVQPGRSLRLDCKASGITFSNSGMHWVRQAP
GKGLEWVAVIWYDGSKRYYADSVKGRF TISRDNSKNTLFLQMNSLRAED
TAVYYCATNDDYWGQGTLVTVSSGGGGSGGGGSGGGGSEIVLT QSPATL
SLSPGERATLSCRASQSVSSYLAWYQQKPGQAPRLLIYDASNRATGIPAR
FSGSGSGTD FTLTISSLEPEDFAVYYCQQSSNWPRTFGQGTKVEIK

### > Seq 114: MOC31-Nivolumab (EpCAM-PD-1)IgG4-SPLE C-Terminal scFv Bivalent Bispecific sAg-PD-1 scFv Orientation 1

[0767] > Light Chain:

DIVLTQSPFSNPVTLGTSASISCRSTKSLLHSNGITYLYWYLQKPGQSPQ
LLIYQMSNLASGVPD RFSSSGSGTDFTLRISRVEAEDVGVYYCAQNLEI
PRTFGGGTKLEIKRTVAAPSVFIFPPSDEQL KSGTASVVCLLNNFYPRE
AKVQWKVDNALQSGNSQESVTEQDSKDSTYSLSSTLTLSKADYEKHK VY
ACEVTHQGLSSPVTKSFNRGEC

### > Seq 115: MOC31-Nivolumab IgG4-SPLE C-Terminal scFv Bivalent Bispecific sAg-PD-1 scFv Orientation 2

[0768] > Heavy Chain:

QVKLQQSGPELKKPGETVKISCKASGYTFTNYGMNWVKQAPGKGLKWMGW
INTYTGESTYADDFK GRFAFSLETSASAAYLQINNLKNEDTATYFCARF
AIKGDYWGQGTTVTVSSASTKGPSVFPLAPC SRSTSESTAALGCLVKDY
FPEPVTVSWNSGALTSGVHTFPAVLQSSGLYSLSSVVTVPSSSLGTK TY
TCNVDHKPSNTKVDKRVESKYGPPCPSCPAPEFLGGPSVFLFPPKPKDTL
MISRTPEVTCVVV DVSQEDPEVQFNWYVDGVEVHNAKTKPREEQFNSTY
RVVSVLTVLHQDWLNGKEYKCKVSNKGLP SSIEKTISKAKGQPREPQVY
TLPPSQEEMTKNQVSLTCLVKGFYPSDIAVEWESNGQPENNYKTT PPVL
DSDGSFFLYSRLTVDKSRWQEGNVFSCSVMHEALHNHYTQKSLSLSLGKG
GGGAGGGGEIV LTQSPATLSLSPGERATLSCRASQSVSSYLAWYQQKPG
QAPRLLIYDASNRATGIPARFSGSGSG TDFTLTISSLEPEDFAVYYCQQ
SSNWPRTFGQGTKVEIKGGGGSGGGGSGGGGSQVQLVESGGGV VQPGRS
LRLDCKASGITFSNSGMHWVRQAPGKGLEWVAVIWYDGSKRYYADSVKGR
FTISRDNSK NTLFLQMNSLRAEDTAVYYCATNDDYWGQGTLVTVSS

### > Seq 116: MOC31-Nivolumab (EpCAM-PD-1)IgG4-SPLE C-Terminal scFv Bivalent Bispecific sAg-PD-1 scFv Orientation 2

[0769] > Light Chain:

DIVLTQSPFSNPVTLGTSASISCRSTKSLLHSNGITYLYWYLQKPGQSPQ
LLIYQMSNLASGVPD RFSSSGSGTDFTLRISRVEAEDVGVYYCAQNLEI
PRTFGGGTKLEIKRTVAAPSVFIFPPSDEQL KSGTASVVCLLNNFYPRE
AKVQWKVDNALQSGNSQESVTEQDSKDSTYSLSSTLTLSKADYEKHK VY
ACEVTHQGLSSPVTKSFNRGEC

### > Seq 117: MOC31-Nivolumab IgG4-SPLE C-Terminal scFv Bivalent Bispecific PD-1-sAg scFv Orientation 1

[0770] > Heavy Chain:

QVQLVESGGGVVQPGRSLRLDCKASGITFSNSGMHWVRQAPGKGLEWVAV
IWYDGSKRYYADSVK GRFTISRDNSKNTLFLQMNSLRAEDTAVYYCATN
DDYWGQGTLVTVSSASTKGPSVFPLAPCSRS TSESTAALGCLVKDYFPE
PVTVSWNSGALTSGVHTFPAVLQSSGLYSLSSVVTVPSSSLGTKTYT CN
VDHKPSNTKVDKRVESKYGPPCPSCPAPEFLGGPSVFLFPPKPKDTLMIS
RTPEVTCVVVDVS QEDPEVQFNWYVDGVEVHNAKTKPREEQFNSTYRVV
SVLTVLHQDWLNGKEYKCKVSNKGLPSSI EKTISKAKGQPREPQVYTLP
PSQEEMTKNQVSLTCLVKGFYPSDIAVEWESNGQPENNYKTTPPV LDSD
GSFFLYSRLTVDKSRWQEGNVFSCSVMHEALHNHYTQKSLSLSLGKGGGG
AGGGGQVKLQQ SGPELKKPGETVKISCKASGYTFTNYGMNWVKQAPGKG
LKWMGWINTYTGESTYADDFKGRFAFS LETSASAAYLQINNLKNEDTAT
YFCARFAIKGDYWGQGTTVTVSSGGGGSGGGGSGGGGSDIVLT QSPFSN
PVTLGTSASISCRSTKSLLHSNGITYLYWYLQKPGQSPQLLIYQMSNLAS
GVPDRFSSS GSGTDFTLRISRVEAEDVGVYYCAQNLEIPRTFGGGTKLE
IK

### > Seq 118: MOC31-Nivolumab (EpCAM-PD-1)IgG4-SPLE C-Terminal scFv Bivalent Bispecific PD-1-sAg scFv Orientation 1

[0771] > Light Chain:

EIVLTQSPATLSLSPGERATLSCRASQSVSSYLAWYQQKPGQAPRLLIYD
ASNRATGIPARFSGS GSGTDFTLTISSLEPEDFAVYYCQQSSNWPRTFG
QGTKVEIKRTVAAPSVFIFPPSDEQLKSGTA SVVCLLNNFYPREAKVQW
KVDNALQSGNSQESVTEQDSKDSTYSLSSTLTLSKADYEKHKVYACE VT
HQGLSSPVTKSFNRGEC

### > Seq 119: MOC31-Nivolumab IgG4-SPLE C-Terminal scFv Bivalent Bispecific PD1-sAg scFv Orientation 2

[0772] > Heavy Chain:

QVQLVESGGGVVQPGRSLRLDCKASGITFSNSGMHWVRQAPGKGLEWVAV
IWYDGSKRYYADSVK GRFTISRDNSKNTLFLQMNSLRAEDTAVYYCATN
DDYWGQGTLVTVSSASTKGPSVFPLAPCSRS TSESTAALGCLVKDYFPE
PVTVSWNSGALTSGVHTFPAVLQSSGLYSLSSVVTVPSSSLGTKTYT CN
VDHKPSNTKVDKRVESKYGPPCPSCPAPEFLGGPSVFLFPPKPKDTLMIS
RTPEVTCVVVDVS QEDPEVQFNWYVDGVEVHNAKTKPREEQFNSTYRVV
SVLTVLHQDWLNGKEYKCKVSNKGLPSSI EKTISKAKGQPREPQVYTLP
PSQEEMTKNQVSLTCLVKGFYPSDIAVEWESNGQPENNYKTTPPV LDSD
GSFFLYSRLTVDKSRWQEGNVFSCSVMHEALHNHYTQKSLSLSLGKGGGG
AGGGGDIVLTQ SPFSNPVTLGTSASISCRSTKSLLHSNGITYLYWYLQK
PGQSPQLLIYQMSNLASGVPDRFSSSG SGTDFTLRISRVEAEDVGVYYC
AQNLEIPRTFGGGTKLEIKGGGGSGGGGSGGGGSQVKLQQSGP ELKKPG
ETVKISCKASGYTFTNYGMNWVKQAPGKGLKWMGWINTYTGESTYADDFK
GRFAFSLET SASAAYLQINNLKNEDTATYFCARFAIKGDYWGQGTTVTV
SS

### > Seq 120: MOC31-Nivolumab (EpCAM-PD-1)IgG4-SPLE C-Terminal scFv Bivalent Bispecific PD1-sAg scFv Orientation 2

[0773] > Light Chain:

EIVLTQSPATLSLSPGERATLSCRASQSVSSYLAWYQQKPGQAPRLLIYD
ASNRATGIPARFSGS GSGTDFTLTISSLEPEDFAVYYCQQSSNWPRTFG
QGTKVEIKRTVAAPSVFIFPPSDEQLKSGTA SVVCLLNNFYPREAKVQW
KVDNALQSGNSQESVTEQDSKDSTYSLSSTLTLSKADYEKHKVYACE VT
HQGLSSPVTKSFNRGEC

### > Seq 121: MOC31-Nivolumab IgG1-KIH-LALA C-Terminal scFv PD1 Monovalent, sAg Bivalent Bispecific 1

[0774] > Heavy Chain 1:

QVKLQQSGPELKKPGETVKISCKASGYTFTNYGMNWVKQAPGKGLKWMGW
INTYTGESTYADDFK GRFAFSLETSASAAYLQINNLKNEDTATYFCARF
AIKGDYWGQGTTVTVSSASTKGPSVFPLAPS SKSTSGGTAALGCLVKDY
FPEPVTVSWNSGALTSGVHTFPAVLQSSGLYSLSSVVTVPSSSLGTQ TY
ICNVNHKPSNTKVDKKVEPKSCDKTHTCPPCPAPEAAGGPSVFLFPPKPK
DTLMISRTPEVTC VVVDVSHEDPEVKFNWYVDGVEVHNAKTKPREEQYN
STYRVVSVLTVLHQDWLNGKEYKCKVSNK ALPAPIEKTISKAKGQPREP
QVYTLPPSRDELTKNQVSLWCLVKGFYPSDIAVEWESNGQPENNY KTTP
PVLDSDGSFFLYSKLTVDKSRWQQGNVFSCSVMHEALHNHYTQKSLSLSP
GKGGGGAGGGG QVQLVESGGGVVQPGRSLRLDCKASGITFSNSGMHWVR
QAPGKGLEWVAVIWYDGSKRYYADSVK GRFTISRDNSKNTLFLQMNSLR
AEDTAVYYCATNDDYWGQGTLVTVSSGGGGSGGGGSGGGGSEI VLTQSP
ATLSLSPGERATLSCRASQSVSSYLAWYQQKPGQAPRLLIYDASNRATGI
PARFSGSGS GTDFTLTISSLEPEDFAVYYCQQSSNWPRTFGQGTKVEIK

### > Seq 122: MOC31-Nivolumab IgG1-KIH-LALA C-Terminal scFv PD1 Monovalent, sAg Bivalent Bispecific 1

[0775] > Heavy Chain 2:

QVKLQQSGPELKKPGETVKISCKASGYTFTNYGMNWVKQAPGKGLKWMGW
INTYTGESTYADDFK GRFAFSLETSASAAYLQINNLKNEDTATYFCARF
AIKGDYWGQGTTVTVSSASTKGPSVFPLAPS SKSTSGGTAALGCLVKDY
FPEPVTVSWNSGALTSGVHTFPAVLQSSGLYSLSSVVTVPSSSLGTQ TY
ICNVNHKPSNTKVDKKVEPKSCDKTHTCPPCPAPEAAGGPSVFLFPPKPK
DTLMISRTPEVTC VVVDVSHEDPEVKFNWYVDGVEVHNAKTKPREEQYN
STYRVVSVLTVLHQDWLNGKEYKCKVSNK ALPAPIEKTISKAKGQPREP
QVYTLPPSRDELTKNQVSLWCLVKGFYPSDIAVEWESNGQPENNY KTTP
PVLDSDGSFFLYSKLTVDKSRWQQGNVFSCSVMHEALHNHYTQKSLSLSP
GK

### > Seq 123: MOC31-Nivolumab (EpCAM-PD-1)IgG1-KIH-LALA C-Terminal scFv PD1 Monovalent, sAg Bivalent Bispecific 1

[0776] > Light Chain:

DIVLTQSPFSNPVTLGTSASISCRSTKSLLHSNGITYLYWYLQKPGQSPQ
LLIYQMSNLASGVPD RFSSSGSGTDFTLRISRVEAEDVGVYYCAQNLEI
PRTFGGGTKLEIKRTVAAPSVFIFPPSDEQL KSGTASVVCLLNNFYPRE
AKVQWKVDNALQSGNSQESVTEQDSKDSTYSLSSTLTLSKADYEKHK VY
ACEVTHQGLSSPVTKSFNRGEC

### > Seq 124: MOC31-Nivolumab IgG1-KIH-LALA C-Terminal scFv PD1 Monovalent, sAg Bivalent Bispecific 2

[0777] > Heavy Chain 1:

QVKLQQSGPELKKPGETVKISCKASGYTFTNYGMNWVKQAPGKGLKWMGW
INTYTGESTYADDFK GRFAFSLETSASAAYLQINNLKNEDTATYFCARF
AIKGDYWGQGTTVTVSSASTKGPSVFPLAPS SKSTSGGTAALGCLVKDY
FPEPVTVSWNSGALTSGVHTFPAVLQSSGLYSLSSVVTVPSSSLGTQ TY
ICNVNHKPSNTKVDKKVEPKSCDKTHTCPPCPAPEAAGGPSVFLFPPKPK
DTLMISRTPEVTC VVVDVSHEDPEVKFNWYVDGVEVHNAKTKPREEQYN
STYRVVSVLTVLHQDWLNGKEYKCKVSNK ALPAPIEKTISKAKGQPREP
QVYTLPPSRDELTKNQVSLWCLVKGFYPSDIAVEWESNGQPENNY KTTP
PVLDSDGSFFLYSKLTVDKSRWQQGNVFSCSVMHEALHNHYTQKSLSLSP
GKGGGGAGGGG EIVLTQSPATLSLSPGERATLSCRASQSVSSYLAWYQQ
KPGQAPRLLIYDASNRATGIPARFSGS GSGTDFTLTISSLEPEDFAVYY
CQQSSNWPRTFGQGTKVEIKGGGGSGGGGSGGGGSQVQLVESG GGVVQP
GRSLRLDCKASGITFSNSGMHWVRQAPGKGLEWVAVIWYDGSKRYYADSV
KGRFTISRD NSKNTLFLQMNSLRAEDTAVYYCATNDDYWGQGTLVTVSS

### > Seq 124: MOC31-Nivolumab IgG1-KIH-LALA C-Terminal scFv PD1 Monovalent, sAg Bivalent Bispecific 2

[0778] > Heavy Chain 2:

QVKLQQSGPELKKPGETVKISCKASGYTFTNYGMNWVKQAPGKGLKWMGW
INTYTGESTYADDFK GRFAFSLETSASAAYLQINNLKNEDTATYFCARF
AIKGDYWGQGTTVTVSSASTKGPSVFPLAPS SKSTSGGTAALGCLVKDY
FPEPVTVSWNSGALTSGVHTFPAVLQSSGLYSLSSVVTVPSSSLGTQ TY
ICNVNHKPSNTKVDKKVEPKSCDKTHTCPPCPAPEAAGGPSVFLFPPKPK
DTLMISRTPEVTC VVVDVSHEDPEVKFNWYVDGVEVHNAKTKPREEQYN
STYRVVSVLTVLHQDWLNGKEYKCKVSNK ALPAPIEKTISKAKGQPREP
QVYTLPPSRDELTKNQVSLWCLVKGFYPSDIAVEWESNGQPENNY KTTP
PVLDSDGSFFLYSKLTVDKSRWQQGNVFSCSVMHEALHNHYTQKSLSLSP
GK

### > Seq 125: MOC31-Nivolumab (EpCAM-PD-1)IgG1-KIH-LALA C-Terminal scFv PD1 Monovalent, sAg Bivalent Bispecific 2

[0779] > Light Chain:

DIVLTQSPFSNPVTLGTSASISCRSTKSLLHSNGITYLYWYLQKPGQSPQ
LLIYQMSNLASGVPD RFSSSGSGTDFTLRISRVEAEDVGVYYCAQNLEI
PRTFGGGTKLEIKRTVAAPSVFIFPPSDEQL KSGTASVVCLLNNFYPRE
AKVQWKVDNALQSGNSQESVTEQDSKDSTYSLSSTLTLSKADYEKHK VY
ACEVTHQGLSSPVTKSFNRGEC

### > Seq 126: MOC31-Nivolumab IgG1-KIH-LALA C-Terminal scFv PD1 Monovalent, sAg Bivalent Bispecific 3

[0780] > Heavy Chain 1:

QVKLQQSGPELKKPGETVKISCKASGYTFTNYGMNWVKQAPGKGLKWMGW
INTYTGESTYADDFK GRFAFSLETSASAAYLQINNLKNEDTATYFCARF
AIKGDYWGQGTTVTVSSASTKGPSVFPLAPS SKSTSGGTAALGCLVKDY
FPEPVTVSWNSGALTSGVHTFPAVLQSSGLYSLSSVVTVPSSSLGTQ TY
ICNVNHKPSNTKVDKKVEPKSCDKTHTCPPCPAPEAAGGPSVFLFPPKPK
DTLMISRTPEVTC VVVDVSHEDPEVKFNWYVDGVEVHNAKTKPREEQYN
STYRVVSVLTVLHQDWLNGKEYKCKVSNK ALPAPIEKTISKAKGQPREP
QVYTLPPSRDELTKNQVSLWCLVKGFYPSDIAVEWESNGQPENNY KTTP
PVLDSDGSFFLYSKLTVDKSRWQQGNVFSCSVMHEALHNHYTQKSLSLSP
GKGGGGAGGGG QVQLVESGGGVVQPGRSLRLDCKASGITFSNSGMHWVR
QAPGKGLEWVAVIWYDGSKRYYADSVK GRFTISRDNSKNTLFLQMNSLR
AEDTAVYYCATNDDYWGQGTLVTVSSGGGGSGGGGSGGGGSEI VLTQSP
ATLSLSPGERATLSCRASQSVSSYLAWYQQKPGQAPRLLIYDASNRATGI
PARFSGSGS GTDFTLTISSLEPEDFAVYYCQQSSNWPRTFGQGTKVEIK

### > Seq 127: MOC31-Nivolumab IgG1-KIH-LALA C-Terminal scFv PD1 Monovalent, sAg Bivalent Bispecific 3

[0781] > Heavy Chain 2:

QVKLQQSGPELKKPGETVKISCKASGYTFTNYGMNWVKQAPGKGLKWMGW
INTYTGESTYADDFK GRFAFSLETSASAAYLQINNLKNEDTATYFCARF
AIKGDYWGQGTTVTVSSASTKGPSVFPLAPS SKSTSGGTAALGCLVKDY
FPEPVTVSWNSGALTSGVHTFPAVLQSSGLYSLSSVVTVPSSSLGTQ TY
ICNVNHKPSNTKVDKKVEPKSCDKTHTCPPCPAPEAAGGPSVFLFPPKPK
DTLMISRTPEVTC VVVDVSHEDPEVKFNWYVDGVEVHNAKTKPREEQYN
STYRVVSVLTVLHQDWLNGKEYKCKVSNK ALPAPIEKTISKAKGQPREP
QVYTLPPSRDELTKNQVSLWCLVKGFYPSDIAVEWESNGQPENNY KTTP
PVLDSDGSFFLYSKLTVDKSRWQQGNVFSCSVMHEALHNHYTQKSLSLSP
GK

### > Seq 128: MOC31-Nivolumab (EpCAM-PD-1)IgG1-KIH-LALA C-Terminal scFv PD1 Monovalent, sAg Bivalent Bispecific 3

[0782] > Light Chain:

DIVLTQSPFSNPVTLGTSASISCRSTKSLLHSNGITYLYWYLQKPGQSPQ
LLIYQMSNLASGVPD RFSSSGSGTDFTLRISRVEAEDVGVYYCAQNLEI
PRTFGGGTKLEIKRTVAAPSVFIFPPSDEQL KSGTASVVCLLNNFYPRE
AKVQWKVDNALQSGNSQESVTEQDSKDSTYSLSSTLTLSKADYEKHK VY
ACEVTHQGLSSPVTKSFNRGEC

### > Seq 129: MOC31-Nivolumab IgG1-KIH-LALA C-Terminal scFv PD1 Monovalent, sAg Bivalent Bispecific 4

[0783] > Heavy Chain 1:

QVKLQQSGPELKKPGETVKISCKASGYTFTNYGMNWVKQAPGKGLKWMGW
INTYTGESTYADDFK GRFAFSLETSASAAYLQINNLKNEDTATYFCARF
AIKGDYWGQGTTVTVSSASTKGPSVFPLAPS SKSTSGGTAALGCLVKDY
FPEPVTVSWNSGALTSGVHTFPAVLQSSGLYSLSSVVTVPSSSLGTQ TY
ICNVNHKPSNTKVDKKVEPKSCDKTHTCPPCPAPEAAGGPSVFLFPPKPK
DTLMISRTPEVTC VVVDVSHEDPEVKFNWYVDGVEVHNAKTKPREEQYN
STYRVVSVLTVLHQDWLNGKEYKCKVSNK ALPAPIEKTISKAKGQPREP
QVYTLPPSRDELTKNQVSLWCLVKGFYPSDIAVEWESNGQPENNY KTTP
PVLDSDGSFFLYSKLTVDKSRWQQGNVFSCSVMHEALHNHYTQKSLSLSP
GKGGGGAGGGG EIVLTQSPATLSLSPGERATLSCRASQSVSSYLAWYQQ
KPGQAPRLLIYDASNRATGIPARFSGS GSGTDFTLTISSLEPEDFAVYY
CQQSSNWPRTFGQGTKVEIKGGGGSGGGGSGGGGSQVQLVESG GGVVQP
GRSLRLDCKASGITFSNSGMHWVRQAPGKGLEWVAVIWYDGSKRYYADSV
KGRFTISRD NSKNTLFLQMNSLRAEDTAVYYCATNDDYWGQGTLVTVSS

### > Seq 130: MOC31-Nivolumab (EpCAM-PD-1)IgG1-KIH-LALA C-Terminal scFv PD1 Monovalent, sAg Bivalent Bispecific 4

[0784] > Heavy Chain 2:

QVKLQQSGPELKKPGETVKISCKASGYTFTNYGMNWVKQAPGKGLKWMGW
INTYTGESTYADDFK GRFAFSLETSASAAYLQINNLKNEDTATYFCARF
AIKGDYWGQGTTVTVSSASTKGPSVFPLAPS SKSTSGGTAALGCLVKDY
FPEPVTVSWNSGALTSGVHTFPAVLQSSGLYSLSSVVTVPSSSLGTQ TY
ICNVNHKPSNTKVDKKVEPKSCDKTHTCPPCPAPEAAGGPSVFLFPPKPK
DTLMISRTPEVTC VVVDVSHEDPEVKFNWYVDGVEVHNAKTKPREEQYN
STYRVVSVLTVLHQDWLNGKEYKCKVSNK ALPAPIEKTISKAKGQPREP
QVYTLPPSRDELTKNQVSLWCLVKGFYPSDIAVEWESNGQPENNY KTTP
PVLDSDGSFFLYSKLTVDKSRWQQGNVFSCSVMHEALHNHYTQKSLSLSP
GK

### > Seq 131: MOC31-Nivolumab (EpCAM-PD-1)IgG1-KIH-LALA C-Terminal scFvPD1 Monovalent, sAg Bivalent Bispecific 4

[0785] > Light Chain:

DIVLTQSPFSNPVTLGTSASISCRSTKSLLHSNGITYLYWYLQKPGQSPQ
LLIYQMSNLASGVPD RFSSSGSGTDFTLRISRVEAEDVGVYYCAQNLEI
PRTFGGGTKLEIKRTVAAPSVFIFPPSDEQL KSGTASVVCLLNNFYPRE
AKVQWKVDNALQSGNSQESVTEQDSKDSTYSLSSTLTLSKADYEKHK VY
ACEVTHQGLSSPVTKSFNRGEC

### > Seq 132: MOC31-Nivolumab IgG1-KIH-LALA Monovalent Bispecific 1

[0786] > Heavy Chain 1:

QVKLQQSGPELKKPGETVKISCKASGYTFTNYGMNWVKQAPGKGLKWMGW
INTYTGESTYADDFK GRFAFSLETSASAAYLQINNLKNEDTATYFCARF
AIKGDYWGQGTTVTVSSASTKGPSVFPLAPS SKSTSGGTAALGCLVKDY
FPEPVTVSWNSGALTSGVHTFPAVLQSSGLYSLSSVVTVPSSSLGTQ TY
ICNVNHKPSNTKVDKKVEPKSCDKTHTCPPCPAPEAAGGPSVFLFPPKPK
DTLMISRTPEVTC VVVDVSHEDPEVKFNWYVDGVEVHNAKTKPREEQYN
STYRVVSVLTVLHQDWLNGKEYKCKVSNK ALPAPIEKTISKAKGQPREP
QVYTLPPSRDELTKNQVSLWCLVKGFYPSDIAVEWESNGQPENNY KTTP
PVLDSDGSFFLYSKLTVDKSRWQQGNVFSCSVMHEALHNHYTQKSLSLSP
GK

### > Seq 133: MOC31-Nivolumab (EpCAM-PD-1)IgG1-KIH-LALA Monovalent Bispecific 1

[0787] > Heavy Chain 2:

QVQLVESGGGVVQPGRSLRLDCKASGITFSNSGMHWVRQAPGKGLEWVAV
IWYDGSKRYYADSVK GRFTISRDNSKNTLFLQMNSLRAEDTAVYYCATN
DDYWGQGTLVTVSSASTKGPSVFPLAPSSKS TSGGTAALGCLVKDYFPE
PVTVSWNSGALTSGVHTFPAVLQSSGLYSLSSVVTVPSSSLGTQTYI CN
VNHKPSNTKVDKKVEPKSCDKTHTCPPCPAPEAAGGPSVFLFPPKPKDTL
MISRTPEVTCVVV DVSHEDPEVKFNWYVDGVEVHNAKTKPREEQYNSTY
RVVSVLTVLHQDWLNGKEYKCKVSNKALP APIEKTISKAKGQPREPQVY
TLPPSRDELTKNQVSLWCLVKGFYPSDIAVEWESNGQPENNYKTT PPVL
DSDGSFFLYSKLTVDKSRWQQGNVFSCSVMHEALHNHYTQKSLSLSPGK

### > Seq 134: MOC31-Nivolumab (EpCAM-PD-1)IgG1-KIH-LALA Monovalent Bispecific 1

[0788] > Light Chain 1:

DIVLTQSPFSNPVTLGTSASISCRSTKSLLHSNGITYLYWYLQKPGQSPQ
LLIYQMSNLASGVPD RFSSSGSGTDFTLRISRVEAEDVGVYYCAQNLEI
PRTFGGGTKLEIKRTVAAPSVFIFPPSDEQL KSGTASVVCLLNNFYPRE
AKVQWKVDNALQSGNSQESVTEQDSKDSTYSLSSTLTLSKADYEKHK VY
ACEVTHQGLSSPVTKSFNRGEC

### > Seq 135: MOC31-Nivolumab (EpCAM-PD-1)IgG1-KIH-LALA Monovalent Bispecific 1

[0789] > Light Chain 2:

EIVLTQSPATLSLSPGERATLSCRASQSVSSYLAWYQQKPGQAPRLLIYD
ASNRATGIPARFSGS GSGTDFTLTISSLEPEDFAVYYCQQSSNWPRTFG
QGTKVEIKRTVAAPSVFIFPPSDEQLKSGTA SVVCLLNNFYPREAKVQW
KVDNALQSGNSQESVTEQDSKDSTYSLSSTLTLSKADYEKHKVYACE VT
HQGLSSPVTKSFNRGEC

### > Seq 136: MOC31-Nivolumab IgG1-KIH-LALA Monovalent Bispecific 2

[0790] > Heavy Chain 1:

QVKLQQSGPELKKPGETVKISCKASGYTFTNYGMNWVKQAPGKGLKWMGW
INTYTGESTYADDFK GRFAFSLETSASAAYLQINNLKNEDTATYFCARF
AIKGDYWGQGTTVTVSSASTKGPSVFPLAPS SKSTSGGTAALGCLVKDY
FPEPVTVSWNSGALTSGVHTFPAVLQSSGLYSLSSVVTVPSSSLGTQ TY
ICNVNHKPSNTKVDKKVEPKSCDKTHTCPPCPAPEAAGGPSVFLFPPKPK
DTLMISRTPEVTC VVVDVSHEDPEVKFNWYVDGVEVHNAKTKPREEQYN
STYRVVSVLTVLHQDWLNGKEYKCKVSNK ALPAPIEKTISKAKGQPREP
QVYTLPPSRDELTKNQVSLWCLVKGFYPSDIAVEWESNGQPENNY KTTP
PVLDSDGSFFLYSKLTVDKSRWQQGNVFSCSVMHEALHNHYTQKSLSLSP
GK

### > Seq 137: MOC31-Nivolumab (EpCAM-PD-1)IgG1-KIH-LALA Monovalent Bispecific 2

[0791] > Heavy Chain 2:

QVQLVESGGGVVQPGRSLRLDCKASGITFSNSGMHWVRQAPGKGLEWVAV
IWYDGSKRYYADSVK GRFTISRDNSKNTLFLQMNSLRAEDTAVYYCATN
DDYWGQGTLVTVSSASTKGPSVFPLAPSSKS TSGGTAALGCLVKDYFPE
PVTVSWNSGALTSGVHTFPAVLQSSGLYSLSSVVTVPSSSLGTQTYI CN
VNHKPSNTKVDKKVEPKSCDKTHTCPPCPAPEAAGGPSVFLFPPKPKDTL
MISRTPEVTCVVV DVSHEDPEVKFNWYVDGVEVHNAKTKPREEQYNSTY
RVVSVLTVLHQDWLNGKEYKCKVSNKALP APIEKTISKAKGQPREPQVY
TLPPSRDELTKNQVSLWCLVKGFYPSDIAVEWESNGQPENNYKTT PPVL
DSDGSFFLYSKLTVDKSRWQQGNVFSCSVMHEALHNHYTQKSLSLSPGK

### > Seq 138: MOC31-Nivolumab (EpCAM-PD-1)IgG1-KIH-LALA Monovalent Bispecific 2

[0792] > Light Chain 1:

DIVLTQSPFSNPVTLGTSASISCRSTKSLLHSNGITYLYWYLQKPGQSPQ
LLIYQMSNLASGVPD RFSSSGSGTDFTLRISRVEAEDVGVYYCAQNLEI
PRTFGGGTKLEIKRTVAAPSVFIFPPSDEQL KSGTASVVCLLNNFYPRE
AKVQWKVDNALQSGNSQESVTEQDSKDSTYSLSSTLTLSKADYEKHK VY
ACEVTHQGLSSPVTKSFNRGEC

### > Seq 139: MOC31-Nivolumab (EpCAM-PD-1)IgG1-KIH-LALA Monovalent Bispecific 2

[0793] > Light Chain 2:

EIVLTQSPATLSLSPGERATLSCRASQSVSSYLAWYQQKPGQAPRLLIYD
ASNRATGIPARFSGS GSGTDFTLTISSLEPEDFAVYYCQQSSNWPRTFG
QGTKVEIKRTVAAPSVFIFPPSDEQLKSGTA SVVCLLNNFYPREAKVQW
KVDNALQSGNSQESVTEQDSKDSTYSLSSTLTLSKADYEKHKVYACE VT
HQGLSSPVTKSFNRGEC

### > Seq 140: Adecatumumab-Pembrolizumab (EpCAM-PD-1)IgG4-SPLE C-Terminal scFv Bivalent Bispecific sAg-PD-1 scFv Orientation 1

[0794] > Heavy Chain:

EVQLLESGGGVVQPGRSLRLSCAASGFTFSSYGMHWVRQAPGKGLEWVAV
ISYDGSNKYYADSVK GRFTISRDNSKNTLYLQMNSLRAEDTAVYYCAKD
MGWGSGWRPYYYYGMDVWGQGTTVTVSSAST KGPSVFPLAPCSRSTSES
TAALGCLVKDYFPEPVTVSWNSGALTSGVHTFPAVLQSSGLYSLSSV VT
VPSSSLGTKTYTCNVDHKPSNTKVDKRVESKYGPPCPSCPAPEFLGGPSV
FLFPPKPKDTLMI SRTPEVTCVVVDVSQEDPEVQFNWYVDGVEVHNAKT
KPREEQFNSTYRVVSVLTVLHQDWLNGKE YKCKVSNKGLPSSIEKTISK
AKGQPREPQVYTLPPSQEEMTKNQVSLTCLVKGFYPSDIAVEWES NGQP
ENNYKTTPPVLDSDGSFFLYSRLTVDKSRWQEGNVFSCSVMHEALHNHYT
QKSLSLSLGKG GGGAGGGGQVQLVQSGVEVKKPGASVKVSCKASGYTFT
NYYMYWVRQAPGQGLEWMGGINPSNGG TNFNEKFKNRVTLTTDSSTTTA
YMELKSLQFDDTAVYYCARRDYRFDMGFDYWGQGTTVTVSSGG GGSGGG
GSGGGGSEIVLTQSPATLSLSPGERATLSCRASKGVSTSGYSYLHWYQQK
PGQAPRLLI YLASYLESGVPARFSGSGSGTDFTLTISSLEPEDFAVYYC
QHSRDLPLTFGGGTKVEIK

### > Seq 141: Adecatumumab-Pembrolizumab (EpCAM-PD-1)IgG4-SPLE C-Terminal scFv Bivalent Bispecific sAg-PD-1 scFv Orientation 1

[0795] > Light Chain:

ELQMTQSPSSLSASVGDRVTITCRTSQSISSYLNWYQQKPGQPPKLLIYW
ASTRESGVPDRFSGS GSGTDFTLTISSLQPEDSATYYCQQSYDIPYTFG
QGTKLEIKRTVAAPSVFIFPPSDEQLKSGTA SVVCLLNNFYPREAKVQW
KVDNALQSGNSQESVTEQDSKDSTYSLSSTLTLSKADYEKHKVYACE VT
HQGLSSPVTKSFNRGEC

### > Seq 142: Adecatumumab-Pembrolizumab IgG4-SPLE C-Terminal scFv Bivalent Bispecific sAg-PD-1 scFv Orientation 2

[0796] > Heavy Chain:

EVQLLESGGGVVQPGRSLRLSCAASGFTFSSYGMHWVRQAPGKGLEWVAV
ISYDGSNKYYADSVK GRFTISRDNSKNTLYLQMNSLRAEDTAVYYCAKD
MGWGSGWRPYYYYGMDVWGQGTTVTVSSAST KGPSVFPLAPCSRSTSES
TAALGCLVKDYFPEPVTVSWNSGALTSGVHTFPAVLQSSGLYSLSSV VT
VPSSSLGTKTYTCNVDHKPSNTKVDKRVESKYGPPCPSCPAPEFLGGPSV
FLFPPKPKDTLMI SRTPEVTCVVVDVSQEDPEVQFNWYVDGVEVHNAKT
KPREEQFNSTYRVVSVLTVLHQDWLNGKE YKCKVSNKGLPSSIEKTISK
AKGQPREPQVYTLPPSQEEMTKNQVSLTCLVKGFYPSDIAVEWES NGQP
ENNYKTTPPVLDSDGSFFLYSRLTVDKSRWQEGNVFSCSVMHEALHNHYT
QKSLSLSLGKG GGGAGGGGEIVLTQSPATLSLSPGERATLSCRASKGVS
TSGYSYLHWYQQKPGQAPRLLIYLASY LESGVPARFSGSGSGTDFTLTI
SSLEPEDFAVYYCQHSRDLPLTFGGGTKVEIKGGGGSGGGGSG GGGSQV
QLVQSGVEVKKPGASVKVSCKASGYTFTNYYMYWVRQAPGQGLEWMGGIN
PSNGGTNFN EKFKNRVTLTTDSSTTTAYMELKSLQFDDTAVYYCARRDY
RFDMGFDYWGQGTTVTVSS

### > Seq 143: Adecatumumab-Pembrolizumab (EpCAM-PD-1)IgG4-SPLE C-Terminal scFv Bivalent Bispecific sAg-PD-1 scFv Orientation 2

[0797] > Light Chain:

ELQMTQSPSSLSASVGDRVTITCRTSQSISSYLNWYQQKPGQPPKLLIYW
ASTRESGVPDRFSGS GSGTDFTLTISSLQPEDSATYYCQQSYDIPYTFG
QGTKLEIKRTVAAPSVFIFPPSDEQLKSGTA SVVCLLNNFYPREAKVQW
KVDNALQSGNSQESVTEQDSKDSTYSLSSTLTLSKADYEKHKVYACE VT
HQGLSSPVTKSFNRGEC

### > Seq 144: Adecatumumab-Pembrolizumab IgG4-SPLE C-Terminal scFv Bivalent Bispecific PD-1-sAg scFv Orientation 1

[0798] > Heavy Chain:

QVQLVQSGVEVKKPGASVKVSCKASGYTFTNYYMYWVRQAPGQGLEWMGG
INPSNGGTNFNEKFK NRVTLTTDSSTTTAYMELKSLQFDDTAVYYCARR
DYRFDMGFDYWGQGTTVTVSSASTKGPSVFP LAPCSRSTSESTAALGCL
VKDYFPEPVTVSWNSGALTSGVHTFPAVLQSSGLYSLSSVVTVPSSS LG
TKTYTCNVDHKPSNTKVDKRVESKYGPPCPSCPAPEFLGGPSVFLFPPKP
KDTLMISRTPEVT CVVVDVSQEDPEVQFNWYVDGVEVHNAKTKPREEQF
NSTYRVVSVLTVLHQDWLNGKEYKCKVSN KGLPSSIEKTISKAKGQPRE
PQVYTLPPSQEEMTKNQVSLTCLVKGFYPSDIAVEWESNGQPENN YKTT
PPVLDSDGSFFLYSRLTVDKSRWQEGNVFSCSVMHEALHNHYTQKSLSLS
LGKGGGGAGGG GEVQLLESGGGVVQPGRSLRLSCAASGFTFSSYGMHWV
RQAPGKGLEWVAVISYDGSNKYYADSV KGRFTISRDNSKNTLYLQMNSL
RAEDTAVYYCAKDMGWGSGWRPYYYYGMDVWGQGTTVTVSSGG GGSGGG
GSGGGGSELQMTQSPSSLSASVGDRVTITCRTSQSISSYLNWYQQKPGQP
PKLLIYWAS TRESGVPDRFSGSGSGTDFTLTISSLQPEDSATYYCQQSY
DIPYTFGQGTKLEIK

### > Seq 145: Adecatumumab-Pembrolizumab (EpCAM-PD-1)IgG4-SPLE C-Terminal scFv Bivalent Bispecific PD-1-sAg scFv Orientation 1

[0799] > Light Chain:

EIVLTQSPATLSLSPGERATLSCRASKGVSTSGYSYLHWYQQKPGQAPRL
LIYLASYLESGVPAR FSGSGSGTDFTLTISSLEPEDFAVYYCQHSRDLP
LTFGGGTKVEIKRTVAAPSVFIFPPSDEQLK SGTASVVCLLNNFYPREA
KVQWKVDNALQSGNSQESVTEQDSKDSTYSLSSTLTLSKADYEKHKV YA
CEVTHQGLSSPVTKSFNRGEC

### > Seq 146: Adecatumumab-Pembrolizumab IgG4-SPLE C-Terminal scFv Bivalent Bispecific PD1-sAg scFv Orientation 2

[0800] > Heavy Chain:

QVQLVQSGVEVKKPGASVKVSCKASGYTFTNYYMYWVRQAPGQGLEWMGG
INPSNGGTNFNEKFK NRVTLTTDSSTTTAYMELKSLQFDDTAVYYCARR
DYRFDMGFDYWGQGTTVTVSSASTKGPSVFP LAPCSRSTSESTAALGCL
VKDYFPEPVTVSWNSGALTSGVHTFPAVLQSSGLYSLSSVVTVPSSS LG
TKTYTCNVDHKPSNTKVDKRVESKYGPPCPSCPAPEFLGGPSVFLFPPKP
KDTLMISRTPEVT CVVVDVSQEDPEVQFNWYVDGVEVHNAKTKPREEQF
NSTYRVVSVLTVLHQDWLNGKEYKCKVSN KGLPSSIEKTISKAKGQPRE
PQVYTLPPSQEEMTKNQVSLTCLVKGFYPSDIAVEWESNGQPENN YKTT
PPVLDSDGSFFLYSRLTVDKSRWQEGNVFSCSVMHEALHNHYTQKSLSLS
LGKGGGGAGGG GELQMTQSPSSLSASVGDRVTITCRTSQSISSYLNWYQ
QKPGQPPKLLIYWASTRESGVPDRFSG SGSGTDFTLTISSLQPEDSATY
YCQQSYDIPYTFGQGTKLEIKGGGGSGGGGSGGGGSEVQLLES GGGVVQ
PGRSLRLSCAASGFTFSSYGMHWVRQAPGKGLEWVAVISYDGSNKYYADS
VKGRFTISR DNSKNTLYLQMNSLRAEDTAVYYCAKDMGWGSGWRPYYYY
GMDVWGQGTTVTVSS

### > Seq 147: Adecatumumab-Pembrolizumab (EpCAM-PD-1)IgG4-SPLE C-Terminal scFv Bivalent Bispecific PD1-sAg scFv Orientation 2

[0801] > Light Chain:

EIVLTQSPATLSLSPGERATLSCRASKGVSTSGYSYLHWYQQKPGQAPRL
LIYLASYLESGVPAR FSGSGSGTDFTLTISSLEPEDFAVYYCQHSRDLP
LTFGGGTKVEIKRTVAAPSVFIFPPSDEQLK SGTASVVCLLNNFYPREA
KVQWKVDNALQSGNSQESVTEQDSKDSTYSLSSTLTLSKADYEKHKV YA
CEVTHQGLSSPVTKSFNRGEC

### > Seq 148: Adecatumumab-Pembrolizumab IgG1-KIH-LALA C-Terminal scFv PD1 Monovalent, sAg Bivalent Bispecific 1

[0802] > Heavy Chain 1:

EVQLLESGGGVVQPGRSLRLSCAASGFTFSSYGMHWVRQAPGKGLEWVAV
ISYDGSNKYYADSVK GRFTISRDNSKNTLYLQMNSLRAEDTAVYYCAKD
MGWGSGWRPYYYYGMDVWGQGTTVTVSSAST KGPSVFPLAPSSKSTSGG
TAALGCLVKDYFPEPVTVSWNSGALTSGVHTFPAVLQSSGLYSLSSV VT
VPSSSLGTQTYICNVNHKPSNTKVDKKVEPKSCDKTHTCPPCPAPEAAGG
PSVFLFPPKPKDT LMISRTPEVTCVVVDVSHEDPEVKFNWYVDGVEVHN
AKTKPREEQYNSTYRVVSVLTVLHQDWLN GKEYKCKVSNKALPAPIEKT
ISKAKGQPREPQVYTLPPSRDELTKNQVSLWCLVKGFYPSDIAVE WESN
GQPENNYKTTPPVLDSDGSFFLYSKLTVDKSRWQQGNVFSCSVMHEALHN
HYTQKSLSLSP GKGGGGAGGGGQVQLVQSGVEVKKPGASVKVSCKASGY
TFTNYYMYWVRQAPGQGLEWMGGINPS NGGTNFNEKFKNRVTLTTDSST
TTAYMELKSLQFDDTAVYYCARRDYRFDMGFDYWGQGTTVTVS SGGGGS
GGGGSGGGGSEIVLTQSPATLSLSPGERATLSCRASKGVSTSGYSYLHWY
QQKPGQAPR LLIYLASYLESGVPARFSGSGSGTDFTLTISSLEPEDFAV
YYCQHSRDLPLTFGGGTKVEIK

### > Seq 149: Adecatumumab-Pembrolizumab IgG1-KIH-LALA C-Terminal scFv PD1 Monovalent, sAg Bivalent Bispecific 1

[0803] > Heavy Chain 2:

EVQLLESGGGVVQPGRSLRLSCAASGFTFSSYGMHWVRQAPGKGLEWVAV
ISYDGSNKYYADSVK GRFTISRDNSKNTLYLQMNSLRAEDTAVYYCAKD
MGWGSGWRPYYYYGMDVWGQGTTVTVSSAST KGPSVFPLAPSSKSTSGG
TAALGCLVKDYFPEPVTVSWNSGALTSGVHTFPAVLQSSGLYSLSSV VT
VPSSSLGTQTYICNVNHKPSNTKVDKKVEPKSCDKTHTCPPCPAPEAAGG
PSVFLFPPKPKDT LMISRTPEVTCVVVDVSHEDPEVKFNWYVDGVEVHN
AKTKPREEQYNSTYRVVSVLTVLHQDWLN GKEYKCKVSNKALPAPIEKT
ISKAKGQPREPQVYTLPPSRDELTKNQVSLWCLVKGFYPSDIAVE WESN
GQPENNYKTTPPVLDSDGSFFLYSKLTVDKSRWQQGNVFSCSVMHEALHN
HYTQKSLSLSP GK

### > Seq 150: Adecatumumab-Pembrolizumab (EpCAM-PD-1)IgG1-KIH-LALA C-Terminal scFv PD1 Monovalent, sAg Bivalent Bispecific 1

[0804] > Light Chain:

ELQMTQSPSSLSASVGDRVTITCRTSQSISSYLNWYQQKPGQPPKLLIYW
ASTRESGVPDRFSGS GSGTDFTLTISSLQPEDSATYYCQQSYDIPYTFG
QGTKLEIKRTVAAPSVFIFPPSDEQLKSGTA SVVCLLNNFYPREAKVQW
KVDNALQSGNSQESVTEQDSKDSTYSLSSTLTLSKADYEKHKVYACE VT
HQGLSSPVTKSFNRGEC

### > Seq 151: Adecatumumab-Pembrolizumab IgG1-KIH-LALA C-Terminal scFv PD1 Monovalent, sAg Bivalent Bispecific 2

[0805] > Heavy Chain 1:

EVQLLESGGGVVQPGRSLRLSCAASGFTFSSYGMHWVRQAPGKGLEWVAV
ISYDGSNKYYADSVK GRFTISRDNSKNTLYLQMNSLRAEDTAVYYCAKD
MGWGSGWRPYYYYGMDVWGQGTTVTVSSAST KGPSVFPLAPSSKSTSGG
TAALGCLVKDYFPEPVTVSWNSGALTSGVHTFPAVLQSSGLYSLSSV VT
VPSSSLGTQTYICNVNHKPSNTKVDKKVEPKSCDKTHTCPPCPAPEAAGG
PSVFLFPPKPKDT LMISRTPEVTCVVVDVSHEDPEVKFNWYVDGVEVHN
AKTKPREEQYNSTYRVVSVLTVLHQDWLN GKEYKCKVSNKALPAPIEKT
ISKAKGQPREPQVYTLPPSRDELTKNQVSLWCLVKGFYPSDIAVE WESN
GQPENNYKTTPPVLDSDGSFFLYSKLTVDKSRWQQGNVFSCSVMHEALHN
HYTQKSLSLSP GKGGGGAGGGGEIVLTQSPATLSLSPGERATLSCRASK
GVSTSGYSYLHWYQQKPGQAPRLLIYL ASYLESGVPARFSGSGSGTDFT
LTISSLEPEDFAVYYCQHSRDLPLTFGGGTKVEIKGGGGSGGG GSGGGG
SQVQLVQSGVEVKKPGASVKVSCKASGYTFTNYYMYWVRQAPGQGLEWMG
GINPSNGGT NFNEKFKNRVTLTTDSSTTTAYMELKSLQFDDTAVYYCAR
RDYRFDMGFDYWGQGTTVTVSS

### > Seq 151: Adecatumumab-Pembrolizumab IgG1-KIH-LALA C-Terminal scFv PD1 Monovalent, sAg Bivalent Bispecific 2

[0806] > Heavy Chain 2:

EVQLLESGGGVVQPGRSLRLSCAASGFTFSSYGMHWVRQAPGKGLEWVAV
ISYDGSNKYYADSVK GRFTISRDNSKNTLYLQMNSLRAEDTAVYYCAKD
MGWGSGWRPYYYYGMDVWGQGTTVTVSSAST KGPSVFPLAPSSKSTSGG
TAALGCLVKDYFPEPVTVSWNSGALTSGVHTFPAVLQSSGLYSLSSV VT
VPSSSLGTQTYICNVNHKPSNTKVDKKVEPKSCDKTHTCPPCPAPEAAGG
PSVFLFPPKPKDT LMISRTPEVTCVVVDVSHEDPEVKFNWYVDGVEVHN
AKTKPREEQYNSTYRVVSVLTVLHQDWLN GKEYKCKVSNKALPAPIEKT
ISKAKGQPREPQVYTLPPSRDELTKNQVSLWCLVKGFYPSDIAVE WESN
GQPENNYKTTPPVLDSDGSFFLYSKLTVDKSRWQQGNVFSCSVMHEALHN
HYTQKSLSLSP GK

### > Seq 152: Adecatumumab-Pembrolizumab (EpCAM-PD-1)IgG1-KIH-LALA C-Terminal scFv PD1 Monovalent, sAg Bivalent Bispecific 2

[0807] > Light Chain:

ELQMTQSPSSLSASVGDRVTITCRTSQSISSYLNWYQQKPGQPPKLLIYW
ASTRESGVPDRFSGS GSGTDFTLTISSLQPEDSATYYCQQSYDIPYTFG
QGTKLEIKRTVAAPSVFIFPPSDEQLKSGTA SVVCLLNNFYPREAKVQW
KVDNALQSGNSQESVTEQDSKDSTYSLSSTLTLSKADYEKHKVYACE VT
HQGLSSPVTKSFNRGEC

### > Seq 153: Adecatumumab-Pembrolizumab IgG1-KIH-LALA C-Terminal scFv PD1 Monovalent, sAg Bivalent Bispecific 3

[0808] > Heavy Chain 1:

EVQLLESGGGVVQPGRSLRLSCAASGFTFSSYGMHWVRQAPGKGLEWVAV
ISYDGSNKYYADSVK GRFTISRDNSKNTLYLQMNSLRAEDTAVYYCAKD
MGWGSGWRPYYYYGMDVWGQGTTVTVSSAST KGPSVFPLAPSSKSTSGG
TAALGCLVKDYFPEPVTVSWNSGALTSGVHTFPAVLQSSGLYSLSSV VT
VPSSSLGTQTYICNVNHKPSNTKVDKKVEPKSCDKTHTCPPCPAPEAAGG
PSVFLFPPKPKDT LMISRTPEVTCVVVDVSHEDPEVKFNWYVDGVEVHN
AKTKPREEQYNSTYRVVSVLTVLHQDWLN GKEYKCKVSNKALPAPIEKT
ISKAKGQPREPQVYTLPPSRDELTKNQVSLWCLVKGFYPSDIAVE WESN
GQPENNYKTTPPVLDSDGSFFLYSKLTVDKSRWQQGNVFSCSVMHEALHN
HYTQKSLSLSP GKGGGGAGGGGQVQLVQSGVEVKKPGASVKVSCKASGY
TFTNYYMYWVRQAPGQGLEWMGGINPS NGGTNFNEKFKNRVTLTTDSST
TTAYMELKSLQFDDTAVYYCARRDYRFDMGFDYWGQGTTVTVS SGGGGS
GGGGSGGGGSEIVLTQSPATLSLSPGERATLSCRASKGVSTSGYSYLHWY
QQKPGQAPR LLIYLASYLESGVPARFSGSGSGTDFTLTISSLEPEDFAV
YYCQHSRDLPLTFGGGTKVEIK

### > Seq 154: Adecatumumab-Pembrolizumab IgG1-KIH-LALA C-Terminal scFv PD1 Monovalent, sAg Bivalent Bispecific 3

[0809] > Heavy Chain 2:

EVQLLESGGGVVQPGRSLRLSCAASGFTFSSYGMHWVRQAPGKGLEWVAV
ISYDGSNKYYADSVK GRFTISRDNSKNTLYLQMNSLRAEDTAVYYCAKD
MGWGSGWRPYYYYGMDVWGQGTTVTVSSAST KGPSVFPLAPSSKSTSGG
TAALGCLVKDYFPEPVTVSWNSGALTSGVHTFPAVLQSSGLYSLSSV VT
VPSSSLGTQTYICNVNHKPSNTKVDKKVEPKSCDKTHTCPPCPAPEAAGG
PSVFLFPPKPKDT LMISRTPEVTCVVVDVSHEDPEVKFNWYVDGVEVHN
AKTKPREEQYNSTYRVVSVLTVLHQDWLN GKEYKCKVSNKALPAPIEKT
ISKAKGQPREPQVYTLPPSRDELTKNQVSLWCLVKGFYPSDIAVE WESN
GQPENNYKTTPPVLDSDGSFFLYSKLTVDKSRWQQGNVFSCSVMHEALHN
HYTQKSLSLSP GK

### > Seq 155: Adecatumumab-Pembrolizumab (EpCAM-PD-1)IgG1-KIH-LALA C-Terminal scFv PD1 Monovalent, sAg Bivalent Bispecific 3

[0810] > Light Chain:

ELQMTQSPSSLSASVGDRVTITCRTSQSISSYLNWYQQKPGQPPKLLIYW
ASTRESGVPDRFSGS GSGTDFTLTISSLQPEDSATYYCQQSYDIPYTFG
QGTKLEIKRTVAAPSVFIFPPSDEQLKSGTA SVVCLLNNFYPREAKVQW
KVDNALQSGNSQESVTEQDSKDSTYSLSSTLTLSKADYEKHKVYACE VT
HQGLSSPVTKSFNRGEC

### > Seq 156: Adecatumumab-Pembrolizumab IgG1-KIH-LALA C-Terminal scFv PD1 Monovalent, sAg Bivalent Bispecific 4

[0811] > Heavy Chain 1:

EVQLLESGGGVVQPGRSLRLSCAASGFTFSSYGMHWVRQAPGKGLEWVAV
ISYDGSNKYYADSVK GRFTISRDNSKNTLYLQMNSLRAEDTAVYYCAKD
MGWGSGWRPYYYYGMDVWGQGTTVTVSSAST KGPSVFPLAPSSKSTSGG
TAALGCLVKDYFPEPVTVSWNSGALTSGVHTFPAVLQSSGLYSLSSV VT
VPSSSLGTQTYICNVNHKPSNTKVDKKVEPKSCDKTHTCPPCPAPEAAGG
PSVFLFPPKPKDT LMISRTPEVTCVVVDVSHEDPEVKFNWYVDGVEVHN
AKTKPREEQYNSTYRVVSVLTVLHQDWLN GKEYKCKVSNKALPAPIEKT
ISKAKGQPREPQVYTLPPSRDELTKNQVSLWCLVKGFYPSDIAVE WESN
GQPENNYKTTPPVLDSDGSFFLYSKLTVDKSRWQQGNVFSCSVMHEALHN
HYTQKSLSLSP GKGGGGAGGGGEIVLTQSPATLSLSPGERATLSCRASK
GVSTSGYSYLHWYQQKPGQAPRLLIYL ASYLESGVPARFSGSGSGTDFT
LTISSLEPEDFAVYYCQHSRDLPLTFGGGTKVEIKGGGGSGGG GSGGGG
SQVQLVQSGVEVKKPGASVKVSCKASGYTFTNYYMYWVRQAPGQGLEWMG
GINPSNGGT NFNEKFKNRVTLTTDSSTTTAYMELKSLQFDDTAVYYCAR
RDYRFDMGFDYWGQGTTVTVSS

### > Seq 157: Adecatumumab-Pembrolizumab (EpCAM-PD-1)IgG1-KIH-LALA C-Terminal scFv PD1 Monovalent, sAg Bivalent Bispecific 4

[0812] > Heavy Chain 2:

EVQLLESGGGVVQPGRSLRLSCAASGFTFSSYGMHWVRQAPGKGLEWVAV
ISYDGSNKYYADSVK GRFTISRDNSKNTLYLQMNSLRAEDTAVYYCAKD
MGWGSGWRPYYYYGMDVWGQGTTVTVSSAST KGPSVFPLAPSSKSTSGG
TAALGCLVKDYFPEPVTVSWNSGALTSGVHTFPAVLQSSGLYSLSSV VT
VPSSSLGTQTYICNVNHKPSNTKVDKKVEPKSCDKTHTCPPCPAPEAAGG
PSVFLFPPKPKDT LMISRTPEVTCVVVDVSHEDPEVKFNWYVDGVEVHN
AKTKPREEQYNSTYRVVSVLTVLHQDWLN GKEYKCKVSNKALPAPIEKT
ISKAKGQPREPQVYTLPPSRDELTKNQVSLWCLVKGFYPSDIAVE WESN
GQPENNYKTTPPVLDSDGSFFLYSKLTVDKSRWQQGNVFSCSVMHEALHN
HYTQKSLSLSP GK

### > Seq 158: Adecatumumab-Pembrolizumab (EpCAM-PD-1)IgG1-KIH-LALA C-Terminal scFv PD1 Monovalent, sAg Bivalent Bispecific 4

[0813] > Light Chain:

ELQMTQSPSSLSASVGDRVTITCRTSQSISSYLNWYQQKPGQPPKLLIYW
ASTRESGVPDRFSGS GSGTDFTLTISSLQPEDSATYYCQQSYDIPYTFG
QGTKLEIKRTVAAPSVFIFPPSDEQLKSGTA SVVCLLNNFYPREAKVQW
KVDNALQSGNSQESVTEQDSKDSTYSLSSTLTLSKADYEKHKVYACE VT
HQGLSSPVTKSFNRGEC

### > Seq 159: Adecatumumab-Pembrolizumab IgG1-KIH-LALA Monovalent Bispecific 1

[0814] > Heavy Chain 1:

EVQLLESGGGVVQPGRSLRLSCAASGFTFSSYGMHWVRQAPGKGLEWVAV
ISYDGSNKYYADSVK GRFTISRDNSKNTLYLQMNSLRAEDTAVYYCAKD
MGWGSGWRPYYYYGMDVWGQGTTVTVSSAST KGPSVFPLAPSSKSTSGG
TAALGCLVKDYFPEPVTVSWNSGALTSGVHTFPAVLQSSGLYSLSSV VT
VPSSSLGTQTYICNVNHKPSNTKVDKKVEPKSCDKTHTCPPCPAPEAAGG
PSVFLFPPKPKDT LMISRTPEVTCVVVDVSHEDPEVKFNWYVDGVEVHN
AKTKPREEQYNSTYRVVSVLTVLHQDWLN GKEYKCKVSNKALPAPIEKT
ISKAKGQPREPQVYTLPPSRDELTKNQVSLWCLVKGFYPSDIAVE WESN
GQPENNYKTTPPVLDSDGSFFLYSKLTVDKSRWQQGNVFSCSVMHEALHN
HYTQKSLSLSP GK

### > Seq 160: Adecatumumab-Pembrolizumab (EpCAM-PD-1)IgG1-KIH-LALA Monovalent Bispecific 1

[0815] > Heavy Chain 2:

QVQLVQSGVEVKKPGASVKVSCKASGYTFTNYYMYWVRQAPGQGLEWMGG
INPSNGGTNFNEKFK NRVTLTTDSSTTTAYMELKSLQFDDTAVYYCARR
DYRFDMGFDYWGQGTTVTVSSASTKGPSVFP LAPSSKSTSGGTAALGCL
VKDYFPEPVTVSWNSGALTSGVHTFPAVLQSSGLYSLSSVVTVPSSS LG
TQTYICNVNHKPSNTKVDKKVEPKSCDKTHTCPPCPAPEAAGGPSVFLFP
PKPKDTLMISRTP EVTCVVVDVSHEDPEVKFNWYVDGVEVHNAKTKPRE
EQYNSTYRVVSVLTVLHQDWLNGKEYKCK VSNKALPAPIEKTISKAKGQ
PREPQVYTLPPSRDELTKNQVSLWCLVKGFYPSDIAVEWESNGQP ENNY
KTTPPVLDSDGSFFLYSKLTVDKSRWQQGNVFSCSVMHEALHNHYTQKSL
SLSPGK

### > Seq 161: Adecatumumab-Pembrolizumab (EpCAM-PD-1)IgG1-KIH-LALA Monovalent Bispecific 1

[0816] > Light Chain 1:

ELQMTQSPSSLSASVGDRVTITCRTSQSISSYLNWYQQKPGQPPKLLIYW
ASTRESGVPDRFSGS GSGTDFTLTISSLQPEDSATYYCQQSYDIPYTFG
QGTKLEIKRTVAAPSVFIFPPSDEQLKSGTA SVVCLLNNFYPREAKVQW
KVDNALQSGNSQESVTEQDSKDSTYSLSSTLTLSKADYEKHKVYACE VT
HQGLSSPVTKSFNRGEC

### > Seq 162: Adecatumumab-Pembrolizumab (EpCAM-PD-1)IgG1-KIH-LALA Monovalent Bispecific 1

[0817] > Light Chain 2:

EIVLTQSPATLSLSPGERATLSCRASKGVSTSGYSYLHWYQQKPGQAPRL
LIYLASYLESGVPAR FSGSGSGTDFTLTISSLEPEDFAVYYCQHSRDLP
LTFGGGTKVEIKRTVAAPSVFIFPPSDEQLK SGTASVVCLLNNFYPREA
KVQWKVDNALQSGNSQESVTEQDSKDSTYSLSSTLTLSKADYEKHKV YA
CEVTHQGLSSPVTKSFNRGEC

### > Seq 163: Adecatumumab-Pembrolizumab IgG1-KIH-LALA Monovalent Bispecific 2

[0818] > Heavy Chain 1:

EVQLLESGGGVVQPGRSLRLSCAASGFTFSSYGMHWVRQAPGKGLEWVAV
ISYDGSNKYYADSVK GRFTISRDNSKNTLYLQMNSLRAEDTAVYYCAKD
MGWGSGWRPYYYYGMDVWGQGTTVTVSSAST KGPSVFPLAPSSKSTSGG
TAALGCLVKDYFPEPVTVSWNSGALTSGVHTFPAVLQSSGLYSLSSV VT
VPSSSLGTQTYICNVNHKPSNTKVDKKVEPKSCDKTHTCPPCPAPEAAGG
PSVFLFPPKPKDT LMISRTPEVTCVVVDVSHEDPEVKFNWYVDGVEVHN
AKTKPREEQYNSTYRVVSVLTVLHQDWLN GKEYKCKVSNKALPAPIEKT
ISKAKGQPREPQVYTLPPSRDELTKNQVSLWCLVKGFYPSDIAVE WESN
GQPENNYKTTPPVLDSDGSFFLYSKLTVDKSRWQQGNVFSCSVMHEALHN
HYTQKSLSLSP GK

### > Seq 164: Adecatumumab-Pembrolizumab (EpCAM-PD-1)IgG1-KIH-LALA Monovalent Bispecific 2

[0819] > Heavy Chain 2:

QVQLVQSGVEVKKPGASVKVSCKASGYTFTNYYMYWVRQAPGQGLEWMGG
INPSNGGTNFNEKFK NRVTLTTDSSTTTAYMELKSLQFDDTAVYYCARR
DYRFDMGFDYWGQGTTVTVSSASTKGPSVFP LAPSSKSTSGGTAALGCL
VKDYFPEPVTVSWNSGALTSGVHTFPAVLQSSGLYSLSSVVTVPSSS LG
TQTYICNVNHKPSNTKVDKKVEPKSCDKTHTCPPCPAPEAAGGPSVFLFP
PKPKDTLMISRTP EVTCVVVDVSHEDPEVKFNWYVDGVEVHNAKTKPRE
EQYNSTYRVVSVLTVLHQDWLNGKEYKCK VSNKALPAPIEKTISKAKGQ
PREPQVYTLPPSRDELTKNQVSLWCLVKGFYPSDIAVEWESNGQP ENNY
KTTPPVLDSDGSFFLYSKLTVDKSRWQQGNVFSCSVMHEALHNHYTQKSL
SLSPGK

### > Seq 165: Adecatumumab-Pembrolizumab (EpCAM-PD-1)IgG1-KIH-LALA Monovalent Bispecific 2

[0820] > Light Chain 1:

ELQMTQSPSSLSASVGDRVTITCRTSQSISSYLNWYQQKPGQPPKLLIYW
ASTRESGVPDRFSGS GSGTDFTLTISSLQPEDSATYYCQQSYDIPYTFG
QGTKLEIKRTVAAPSVFIFPPSDEQLKSGTA SVVCLLNNFYPREAKVQW
KVDNALQSGNSQESVTEQDSKDSTYSLSSTLTLSKADYEKHKVYACE VT
HQGLSSPVTKSFNRGEC

### > Seq 166: Adecatumumab-Pembrolizumab (EpCAM-PD-1)IgG1-KIH-LALA Monovalent Bispecific 2

[0821] > Light Chain 2:

EIVLTQSPATLSLSPGERATLSCRASKGVSTSGYSYLHWYQQKPGQAPRL
LIYLASYLESGVPAR FSGSGSGTDFTLTISSLEPEDFAVYYCQHSRDLP
LTFGGGTKVEIKRTVAAPSVFIFPPSDEQLK SGTASVVCLLNNFYPREA
KVQWKVDNALQSGNSQESVTEQDSKDSTYSLSSTLTLSKADYEKHKV YA
CEVTHQGLSSPVTKSFNRGEC

### > Seq 167: Adecatumumab-Nivolumab (EpCAM-PD-1)IgG4-SPLE C-Terminal scFv Bivalent Bispecific sAg-PD-1 scFv Orientation 1

[0822] > Heavy Chain:

EVQLLESGGGVVQPGRSLRLSCAASGFTFSSYGMHWVRQAPGKGLEWVAV
ISYDGSNKYYADSVK GRFTISRDNSKNTLYLQMNSLRAEDTAVYYCAKD
MGWGSGWRPYYYYGMDVWGQGTTVTVSSAST KGPSVFPLAPCSRSTSES
TAALGCLVKDYFPEPVTVSWNSGALTSGVHTFPAVLQSSGLYSLSSV VT
VPSSSLGTKTYTCNVDHKPSNTKVDKRVESKYGPPCPSCPAPEFLGGPSV
FLFPPKPKDTLMI SRTPEVTCVVVDVSQEDPEVQFNWYVDGVEVHNAKT
KPREEQFNSTYRVVSVLTVLHQDWLNGKE YKCKVSNKGLPSSIEKTISK
AKGQPREPQVYTLPPSQEEMTKNQVSLTCLVKGFYPSDIAVEWES NGQP
ENNYKTTPPVLDSDGSFFLYSRLTVDKSRWQEGNVFSCSVMHEALHNHYT
QKSLSLSLGKG GGGAGGGGQVQLVESGGGVVQPGRSLRLDCKASGITFS
NSGMHWVRQAPGKGLEWVAVIWYDGSK RYYADSVKGRFTISRDNSKNTL
FLQMNSLRAEDTAVYYCATNDDYWGQGTLVTVSSGGGGSGGGG SGGGGS
EIVLTQSPATLSLSPGERATLSCRASQSVSSYLAWYQQKPGQAPRLLIYD
ASNRATGIP ARFSGSGSGTDFTLTISSLEPEDFAVYYCQQSSNWPRTFG
QGTKVEIK

### > Seq 168: Adecatumumab-Nivolumab (EpCAM-PD-1)IgG4-SPLE C-Terminal scFv Bivalent Bispecific sAg-PD-1 scFv Orientation 1

[0823] > Light Chain:

ELQMTQSPSSLSASVGDRVTITCRTSQSISSYLNWYQQKPGQPPKLLIYW
ASTRESGVPDRFSGS GSGTDFTLTISSLQPEDSATYYCQQSYDIPYTFG
QGTKLEIKRTVAAPSVFIFPPSDEQLKSGTA SVVCLLNNFYPREAKVQW
KVDNALQSGNSQESVTEQDSKDSTYSLSSTLTLSKADYEKHKVYACE VT
HQGLSSPVTKSFNRGEC

### > Seq 169: Adecatumumab-Nivolumab IgG4-SPLE C-Terminal scFv Bivalent Bispecific sAg-PD-1 scFv Orientation 2

[0824] > Heavy Chain:

EVQLLESGGGVVQPGRSLRLSCAASGFTFSSYGMHWVRQAPGKGLEWVAV
ISYDGSNKYYADSVK GRFTISRDNSKNTLYLQMNSLRAEDTAVYYCAKD
MGWGSGWRPYYYYGMDVWGQGTTVTVSSAST KGPSVFPLAPCSRSTSES
TAALGCLVKDYFPEPVTVSWNSGALTSGVHTFPAVLQSSGLYSLSSV VT
VPSSSLGTKTYTCNVDHKPSNTKVDKRVESKYGPPCPSCPAPEFLGGPSV
FLFPPKPKDTLMI SRTPEVTCVVVDVSQEDPEVQFNWYVDGVEVHNAKT
KPREEQFNSTYRVVSVLTVLHQDWLNGKE YKCKVSNKGLPSSIEKTISK
AKGQPREPQVYTLPPSQEEMTKNQVSLTCLVKGFYPSDIAVEWES NGQP
ENNYKTTPPVLDSDGSFFLYSRLTVDKSRWQEGNVFSCSVMHEALHNHYT
QKSLSLSLGKG GGGAGGGGEIVLTQSPATLSLSPGERATLSCRASQSVS
SYLAWYQQKPGQAPRLLIYDASNRATG IPARFSGSGSGTDFTLTISSLE
PEDFAVYYCQQSSNWPRTFGQGTKVEIKGGGGSGGGGSGGGGS QVQLVE
SGGGVVQPGRSLRLDCKASGITFSNSGMHWVRQAPGKGLEWVAVIWYDGS
KRYYADSVK GRFTISRDNSKNTLFLQMNSLRAEDTAVYYCATNDDYWGQ
GTLVTVSS

### > Seq 170: Adecatumumab-Nivolumab (EpCAM-PD-1)IgG4-SPLE C-Terminal scFv Bivalent Bispecific sAg-PD-1 scFv Orientation 2

[0825] > Light Chain:

ELQMTQSPSSLSASVGDRVTITCRTSQSISSYLNWYQQKPGQPPKLLIYW
ASTRESGVPDRFSGS GSGTDFTLTISSLQPEDSATYYCQQSYDIPYTFG
QGTKLEIKRTVAAPSVFIFPPSDEQLKSGTA SVVCLLNNFYPREAKVQW
KVDNALQSGNSQESVTEQDSKDSTYSLSSTLTLSKADYEKHKVYACE VT
HQGLSSPVTKSFNRGEC

### > Seq 171: Adecatumumab-Nivolumab IgG4-SPLE C-Terminal scFv Bivalent Bispecific PD-1-sAg scFv Orientation 1

[0826] > Heavy Chain:

QVQLVESGGGVVQPGRSLRLDCKASGITFSNSGMHWVRQAPGKGLEWVAV
IWYDGSKRYYADSVK GRFTISRDNSKNTLFLQMNSLRAEDTAVYYCATN
DDYWGQGTLVTVSSASTKGPSVFPLAPCSRS TSESTAALGCLVKDYFPE
PVTVSWNSGALTSGVHTFPAVLQSSGLYSLSSVVTVPSSSLGTKTYT CN
VDHKPSNTKVDKRVESKYGPPCPSCPAPEFLGGPSVFLFPPKPKDTLMIS
RTPEVTCVVVDVS QEDPEVQFNWYVDGVEVHNAKTKPREEQFNSTYRVV
SVLTVLHQDWLNGKEYKCKVSNKGLPSSI EKTISKAKGQPREPQVYTLP
PSQEEMTKNQVSLTCLVKGFYPSDIAVEWESNGQPENNYKTTPPV LDSD
GSFFLYSRLTVDKSRWQEGNVFSCSVMHEALHNHYTQKSLSLSLGKGGGG
AGGGGEVQLLE SGGGVVQPGRSLRLSCAASGFTFSSYGMHWVRQAPGKG
LEWVAVISYDGSNKYYADSVKGRFTIS RDNSKNTLYLQMNSLRAEDTAV
YYCAKDMGWGSGWRPYYYYGMDVWGQGTTVTVSSGGGGSGGGG SGGGGS
ELQMTQSPSSLSASVGDRVTITCRTSQSISSYLNWYQQKPGQPPKLLIYW
ASTRESGVP DRFSGSGSGTDFTLTISSLQPEDSATYYCQQSYDIPYTFG
QGTKLEIK

### > Seq 172: Adecatumumab-Nivolumab (EpCAM-PD-1)IgG4-SPLE C-Terminal scFv Bivalent Bispecific PD-1-sAg scFv Orientation 1

[0827] > Light Chain:

EIVLTQSPATLSLSPGERATLSCRASQSVSSYLAWYQQKPGQAPRLLIYD
ASNRATGIPARFSGS GSGTDFTLTISSLEPEDFAVYYCQQSSNWPRTFG
QGTKVEIKRTVAAPSVFIFPPSDEQLKSGTA SVVCLLNNFYPREAKVQW
KVDNALQSGNSQESVTEQDSKDSTYSLSSTLTLSKADYEKHKVYACE VT
HQGLSSPVTKSFNRGEC

### > Seq 173: Adecatumumab-Nivolumab IgG4-SPLE C-Terminal scFv Bivalent Bispecific PD1-sAg scFv Orientation 2

[0828] > Heavy Chain:

QVQLVESGGGVVQPGRSLRLDCKASGITFSNSGMHWVRQAPGKGLEWVAV
IWYDGSKRYYADSVK GRFTISRDNSKNTLFLQMNSLRAEDTAVYYCATN
DDYWGQGTLVTVSSASTKGPSVFPLAPCSRS TSESTAALGCLVKDYFPE
PVTVSWNSGALTSGVHTFPAVLQSSGLYSLSSVVTVPSSSLGTKTYT CN
VDHKPSNTKVDKRVESKYGPPCPSCPAPEFLGGPSVFLFPPKPKDTLMIS
RTPEVTCVVVDVS QEDPEVQFNWYVDGVEVHNAKTKPREEQFNSTYRVV
SVLTVLHQDWLNGKEYKCKVSNKGLPSSI EKTISKAKGQPREPQVYTLP
PSQEEMTKNQVSLTCLVKGFYPSDIAVEWESNGQPENNYKTTPPV LDSD
GSFFLYSRLTVDKSRWQEGNVFSCSVMHEALHNHYTQKSLSLSLGKGGGG
AGGGGELQMTQ SPSSLSASVGDRVTITCRTSQSISSYLNWYQQKPGQPP
KLLIYWASTRESGVPDRFSGSGSGTDF TLTISSLQPEDSATYYCQQSYD
IPYTFGQGTKLEIKGGGGSGGGGSGGGGSEVQLLESGGGVVQP GRSLRL
SCAASGFTFSSYGMHWVRQAPGKGLEWVAVISYDGSNKYYADSVKGRFTI
SRDNSKNTL YLQMNSLRAEDTAVYYCAKDMGWGSGWRPYYYYGMDVWGQ
GTTVTVSS

### > Seq 174: Adecatumumab-Nivolumab (EpCAM-PD-1)IgG4-SPLE C-Terminal scFv Bivalent Bispecific PD1-sAg scFv Orientation 2

[0829] > Light Chain:

EIVLTQSPATLSLSPGERATLSCRASQSVSSYLAWYQQKPGQAPRLLIYD
ASNRATGIPARFSGS GSGTDFTLTISSLEPEDFAVYYCQQSSNWPRTFG
QGTKVEIKRTVAAPSVFIFPPSDEQLKSGTA SVVCLLNNFYPREAKVQW
KVDNALQSGNSQESVTEQDSKDSTYSLSSTLTLSKADYEKHKVYACE VT
HQGLSSPVTKSFNRGEC

### > Seq 175: Adecatumumab-Nivolumab IgG1-KIH-LALA C-Terminal scFv PD1 Monovalent, sAg Bivalent Bispecific 1

[0830] > Heavy Chain 1:

EVQLLESGGGVVQPGRSLRLSCAASGFTFSSYGMHWVRQAPGKGLEWVAV
ISYDGSNKYYADSVK GRFTISRDNSKNTLYLQMNSLRAEDTAVYYCAKD
MGWGSGWRPYYYYGMDVWGQGTTVTVSSAST KGPSVFPLAPSSKSTSGG
TAALGCLVKDYFPEPVTVSWNSGALTSGVHTFPAVLQSSGLYSLSSV VT
VPSSSLGTQTYICNVNHKPSNTKVDKKVEPKSCDKTHTCPPCPAPEAAGG
PSVFLFPPKPKDT LMISRTPEVTCVVVDVSHEDPEVKFNWYVDGVEVHN
AKTKPREEQYNSTYRVVSVLTVLHQDWLN GKEYKCKVSNKALPAPIEKT
ISKAKGQPREPQVYTLPPSRDELTKNQVSLWCLVKGFYPSDIAVE WESN
GQPENNYKTTPPVLDSDGSFFLYSKLTVDKSRWQQGNVFSCSVMHEALHN
HYTQKSLSLSP GKGGGGAGGGGQVQLVESGGGVVQPGRSLRLDCKASGI
TFSNSGMHWVRQAPGKGLEWVAVIWYD GSKRYYADSVKGRFTISRDNSK
NTLFLQMNSLRAEDTAVYYCATNDDYWGQGTLVTVSSGGGGSG GGGSGG
GGSEIVLTQSPATLSLSPGERATLSCRASQSVSSYLAWYQQKPGQAPRLL
IYDASNRAT GIPARFSGSGSGTDFTLTISSLEPEDFAVYYCQQSSNWPR
TFGQGTKVEIK

### > Seq 176: Adecatumumab-Nivolumab IgG1-KIH-LALA C-Terminal scFv PD1 Monovalent, sAg Bivalent Bispecific 1

[0831] > Heavy Chain 2:

EVQLLESGGGVVQPGRSLRLSCAASGFTFSSYGMHWVRQAPGKGLEWVAV
ISYDGSNKYYADSVK GRFTISRDNSKNTLYLQMNSLRAEDTAVYYCAKD
MGWGSGWRPYYYYGMDVWGQGTTVTVSSAST KGPSVFPLAPSSKSTSGG
TAALGCLVKDYFPEPVTVSWNSGALTSGVHTFPAVLQSSGLYSLSSV VT
VPSSSLGTQTYICNVNHKPSNTKVDKKVEPKSCDKTHTCPPCPAPEAAGG
PSVFLFPPKPKDT LMISRTPEVTCVVVDVSHEDPEVKFNWYVDGVEVHN
AKTKPREEQYNSTYRVVSVLTVLHQDWLN GKEYKCKVSNKALPAPIEKT
ISKAKGQPREPQVYTLPPSRDELTKNQVSLWCLVKGFYPSDIAVE WESN
GQPENNYKTTPPVLDSDGSFFLYSKLTVDKSRWQQGNVFSCSVMHEALHN
HYTQKSLSLSP GK

### > Seq 177: Adecatumumab-Nivolumab (EpCAM-PD-1)IgG1-KIH-LALA C-Terminal scFv PD1 Monovalent, sAg Bivalent Bispecific 1

[0832] > Light Chain:

ELQMTQSPSSLSASVGDRVTITCRTSQSISSYLNWYQQKPGQPPKLLIYW
ASTRESGVPDRFSGS GSGTDFTLTISSLQPEDSATYYCQQSYDIPYTFG
QGTKLEIKRTVAAPSVFIFPPSDEQLKSGTA SVVCLLNNFYPREAKVQW
KVDNALQSGNSQESVTEQDSKDSTYSLSSTLTLSKADYEKHKVYACE VT
HQGLSSPVTKSFNRGEC

### > Seq 178: Adecatumumab-Nivolumab IgG1-KIH-LALA C-Terminal scFv PD1 Monovalent, sAg Bivalent Bispecific 2

[0833] > Heavy Chain 1:

EVQLLESGGGVVQPGRSLRLSCAASGFTFSSYGMHWVRQAPGKGLEWVAV
ISYDGSNKYYADSVK GRFTISRDNSKNTLYLQMNSLRAEDTAVYYCAKD
MGWGSGWRPYYYYGMDVWGQGTTVTVSSAST KGPSVFPLAPSSKSTSGG
TAALGCLVKDYFPEPVTVSWNSGALTSGVHTFPAVLQSSGLYSLSSV VT
VPSSSLGTQTYICNVNHKPSNTKVDKKVEPKSCDKTHTCPPCPAPEAAGG
PSVFLFPPKPKDT LMISRTPEVTCVVVDVSHEDPEVKFNWYVDGVEVHN
AKTKPREEQYNSTYRVVSVLTVLHQDWLN GKEYKCKVSNKALPAPIEKT
ISKAKGQPREPQVYTLPPSRDELTKNQVSLWCLVKGFYPSDIAVE WESN
GQPENNYKTTPPVLDSDGSFFLYSKLTVDKSRWQQGNVFSCSVMHEALHN
HYTQKSLSLSP GKGGGGAGGGGEIVLTQSPATLSLSPGERATLSCRASQ
SVSSYLAWYQQKPGQAPRLLIYDASNR ATGIPARFSGSGSGTDFTLTIS
SLEPEDFAVYYCQQSSNWPRTFGQGTKVEIKGGGGSGGGGSGG GGSQVQ
LVESGGGVVQPGRSLRLDCKASGITFSNSGMHWVRQAPGKGLEWVAVIWY
DGSKRYYAD SVKGRFTISRDNSKNTLFLQMNSLRAEDTAVYYCATNDDY
WGQGTLVTVSS

### > Seq 178: Adecatumumab-Nivolumab IgG1-KIH-LALA C-Terminal scFv PD1 Monovalent, sAg Bivalent Bispecific 2

[0834] > Heavy Chain 2:

EVQLLESGGGVVQPGRSLRLSCAASGFTFSSYGMHWVRQAPGKGLEWVAV
ISYDGSNKYYADSVK GRFTISRDNSKNTLYLQMNSLRAEDTAVYYCAKD
MGWGSGWRPYYYYGMDVWGQGTTVTVSSAST KGPSVFPLAPSSKSTSGG
TAALGCLVKDYFPEPVTVSWNSGALTSGVHTFPAVLQSSGLYSLSSV VT
VPSSSLGTQTYICNVNHKPSNTKVDKKVEPKSCDKTHTCPPCPAPEAAGG
PSVFLFPPKPKDT LMISRTPEVTCVVVDVSHEDPEVKFNWYVDGVEVHN
AKTKPREEQYNSTYRVVSVLTVLHQDWLN GKEYKCKVSNKALPAPIEKT
ISKAKGQPREPQVYTLPPSRDELTKNQVSLWCLVKGFYPSDIAVE WESN
GQPENNYKTTPPVLDSDGSFFLYSKLTVDKSRWQQGNVFSCSVMHEALHN
HYTQKSLSLSP GK

### > Seq 179: Adecatumumab-Nivolumab (EpCAM-PD-1)IgG1-KIH-LALA C-Terminal scFv PD1 Monovalent, sAg Bivalent Bispecific 2

[0835] > Light Chain:

ELQMTQSPSSLSASVGDRVTITCRTSQSISSYLNWYQQKPGQPPKLLIYW
ASTRESGVPDRFSGS GSGTDFTLTISSLQPEDSATYYCQQSYDIPYTFG
QGTKLEIKRTVAAPSVFIFPPSDEQLKSGTA SVVCLLNNFYPREAKVQW
KVDNALQSGNSQESVTEQDSKDSTYSLSSTLTLSKADYEKHKVYACE VT
HQGLSSPVTKSFNRGEC

### > Seq 180: Adecatumumab-Nivolumab IgG1-KIH-LALA C-Terminal scFv PD1 Monovalent, sAg Bivalent Bispecific 3

[0836] > Heavy Chain 1:

EVQLLESGGGVVQPGRSLRLSCAASGFTFSSYGMHWVRQAPGKGLEWVAV
ISYDGSNKYYADSVK GRFTISRDNSKNTLYLQMNSLRAEDTAVYYCAKD
MGWGSGWRPYYYYGMDVWGQGTTVTVSSAST KGPSVFPLAPSSKSTSGG
TAALGCLVKDYFPEPVTVSWNSGALTSGVHTFPAVLQSSGLYSLSSV VT
VPSSSLGTQTYICNVNHKPSNTKVDKKVEPKSCDKTHTCPPCPAPEAAGG
PSVFLFPPKPKDT LMISRTPEVTCVVVDVSHEDPEVKFNWYVDGVEVHN
AKTKPREEQYNSTYRVVSVLTVLHQDWLN GKEYKCKVSNKALPAPIEKT
ISKAKGQPREPQVYTLPPSRDELTKNQVSLWCLVKGFYPSDIAVE WESN
GQPENNYKTTPPVLDSDGSFFLYSKLTVDKSRWQQGNVFSCSVMHEALHN
HYTQKSLSLSP GKGGGGAGGGGQVQLVESGGGVVQPGRSLRLDCKASGI
TFSNSGMHWVRQAPGKGLEWVAVIWYD GSKRYYADSVKGRFTISRDNSK
NTLFLQMNSLRAEDTAVYYCATNDDYWGQGTLVTVSSGGGGSG GGGSGG
GGSEIVLTQSPATLSLSPGERATLSCRASQSVSSYLAWYQQKPGQAPRLL
IYDASNRAT GIPARFSGSGSGTDFTLTISSLEPEDFAVYYCQQSSNWPR
TFGQGTKVEIK

### > Seq 181: Adecatumumab-Nivolumab IgG1-KIH-LALA C-Terminal scFv PD1 Monovalent, sAg Bivalent Bispecific 3

[0837] > Heavy Chain 2:

EVQLLESGGGVVQPGRSLRLSCAASGFTFSSYGMHWVRQAPGKGLEWVAV
ISYDGSNKYYADSVK GRFTISRDNSKNTLYLQMNSLRAEDTAVYYCAKD
MGWGSGWRPYYYYGMDVWGQGTTVTVSSAST KGPSVFPLAPSSKSTSGG
TAALGCLVKDYFPEPVTVSWNSGALTSGVHTFPAVLQSSGLYSLSSV VT
VPSSSLGTQTYICNVNHKPSNTKVDKKVEPKSCDKTHTCPPCPAPEAAGG
PSVFLFPPKPKDT LMISRTPEVTCVVVDVSHEDPEVKFNWYVDGVEVHN
AKTKPREEQYNSTYRVVSVLTVLHQDWLN GKEYKCKVSNKALPAPIEKT
ISKAKGQPREPQVYTLPPSRDELTKNQVSLWCLVKGFYPSDIAVE WESN
GQPENNYKTTPPVLDSDGSFFLYSKLTVDKSRWQQGNVFSCSVMHEALHN
HYTQKSLSLSP GK

### > Seq 182: Adecatumumab-Nivolumab (EpCAM-PD-1)IgG1-KIH-LALA C-Terminal scFv PD1 Monovalent, sAg Bivalent Bispecific 3

[0838] > Light Chain:

ELQMTQSPSSLSASVGDRVTITCRTSQSISSYLNWYQQKPGQPPKLLIYW
ASTRESGVPDRFSGS GSGTDFTLTISSLQPEDSATYYCQQSYDIPYTFG
QGTKLEIKRTVAAPSVFIFPPSDEQLKSGTA SVVCLLNNFYPREAKVQW
KVDNALQSGNSQESVTEQDSKDSTYSLSSTLTLSKADYEKHKVYACE VT
HQGLSSPVTKSFNRGEC

### > Seq 183: Adecatumumab-Nivolumab IgG1-KIH-LALA C-Terminal scFv PD1 Monovalent, sAg Bivalent Bispecific 4

[0839] > Heavy Chain 1:

EVQLLESGGGVVQPGRSLRLSCAASGFTFSSYGMHWVRQAPGKGLEWVAV
ISYDGSNKYYADSVK GRFTISRDNSKNTLYLQMNSLRAEDTAVYYCAKD
MGWGSGWRPYYYYGMDVWGQGTTVTVSSAST KGPSVFPLAPSSKSTSGG
TAALGCLVKDYFPEPVTVSWNSGALTSGVHTFPAVLQSSGLYSLSSV VT
VPSSSLGTQTYICNVNHKPSNTKVDKKVEPKSCDKTHTCPPCPAPEAAGG
PSVFLFPPKPKDT LMISRTPEVTCVVVDVSHEDPEVKFNWYVDGVEVHN
AKTKPREEQYNSTYRVVSVLTVLHQDWLN GKEYKCKVSNKALPAPIEKT
ISKAKGQPREPQVYTLPPSRDELTKNQVSLWCLVKGFYPSDIAVE WESN
GQPENNYKTTPPVLDSDGSFFLYSKLTVDKSRWQQGNVFSCSVMHEALHN
HYTQKSLSLSP GKGGGGAGGGGEIVLTQSPATLSLSPGERATLSCRASQ
SVSSYLAWYQQKPGQAPRLLIYDASNR ATGIPARFSGSGSGTDFTLTIS
SLEPEDFAVYYCQQSSNWPRTFGQGTKVEIKGGGGSGGGGSGG GGSQVQ
LVESGGGVVQPGRSLRLDCKASGITFSNSGMHWVRQAPGKGLEWVAVIWY
DGSKRYYAD SVKGRFTISRDNSKNTLFLQMNSLRAEDTAVYYCATNDDY
WGQGTLVTVSS

### > Seq 184: Adecatumumab-Nivolumab (EpCAM-PD-1)IgG1-KIH-LALA C-Terminal scFv PD1 Monovalent, sAg Bivalent Bispecific 4

[0840] > Heavy Chain 2:

EVQLLESGGGVVQPGRSLRLSCAASGFTFSSYGMHWVRQAPGKGLEWVAV
ISYDGSNKYYADSVK GRFTISRDNSKNTLYLQMNSLRAEDTAVYYCAKD
MGWGSGWRPYYYYGMDVWGQGTTVTVSSAST KGPSVFPLAPSSKSTSGG
TAALGCLVKDYFPEPVTVSWNSGALTSGVHTFPAVLQSSGLYSLSSV VT
VPSSSLGTQTYICNVNHKPSNTKVDKKVEPKSCDKTHTCPPCPAPEAAGG
PSVFLFPPKPKDT LMISRTPEVTCVVVDVSHEDPEVKFNWYVDGVEVHN
AKTKPREEQYNSTYRVVSVLTVLHQDWLN GKEYKCKVSNKALPAPIEKT
ISKAKGQPREPQVYTLPPSRDELTKNQVSLWCLVKGFYPSDIAVE WESN
GQPENNYKTTPPVLDSDGSFFLYSKLTVDKSRWQQGNVFSCSVMHEALHN
HYTQKSLSLSP GK

### > Seq 185: Adecatumumab-Nivolumab (EpCAM-PD-1)IgG1-KIH-LALA C-Terminal scFv PD1 Monovalent, sAg Bivalent Bispecific 4

[0841] > Light Chain:

ELQMTQSPSSLSASVGDRVTITCRTSQSISSYLNWYQQKPGQPPKLLIYW
ASTRESGVPDRFSGS GSGTDFTLTISSLQPEDSATYYCQQSYDIPYTFG
QGTKLEIKRTVAAPSVFIFPPSDEQLKSGTA SVVCLLNNFYPREAKVQW
KVDNALQSGNSQESVTEQDSKDSTYSLSSTLTLSKADYEKHKVYACE VT
HQGLSSPVTKSFNRGEC

### > Seq 186: Adecatumumab-Nivolumab IgG1-KIH-LALA Monovalent Bispecific 1

[0842] > Heavy Chain 1:

EVQLLESGGGVVQPGRSLRLSCAASGFTFSSYGMHWVRQAPGKGLEWVAV
ISYDGSNKYYADSVK GRFTISRDNSKNTLYLQMNSLRAEDTAVYYCAKD
MGWGSGWRPYYYYGMDVWGQGTTVTVSSAST KGPSVFPLAPSSKSTSGG
TAALGCLVKDYFPEPVTVSWNSGALTSGVHTFPAVLQSSGLYSLSSV VT
VPSSSLGTQTYICNVNHKPSNTKVDKKVEPKSCDKTHTCPPCPAPEAAGG
PSVFLFPPKPKDT LMISRTPEVTCVVVDVSHEDPEVKFNWYVDGVEVHN
AKTKPREEQYNSTYRVVSVLTVLHQDWLN GKEYKCKVSNKALPAPIEKT
ISKAKGQPREPQVYTLPPSRDELTKNQVSLWCLVKGFYPSDIAVE WESN
GQPENNYKTTPPVLDSDGSFFLYSKLTVDKSRWQQGNVFSCSVMHEALHN
HYTQKSLSLSP GK

### > Seq 187: Adecatumumab-Nivolumab (EpCAM-PD-1)IgG1-KIH-LALA Monovalent Bispecific 1

[0843] > Heavy Chain 2:

QVQLVESGGGVVQPGRSLRLDCKASGITFSNSGMHWVRQAPGKGLEWVAV
IWYDGSKRYYADSVK GRFTISRDNSKNTLFLQMNSLRAEDTAVYYCATN
DDYWGQGTLVTVSSASTKGPSVFPLAPSSKS TSGGTAALGCLVKDYFPE
PVTVSWNSGALTSGVHTFPAVLQSSGLYSLSSVVTVPSSSLGTQTYI CN
VNHKPSNTKVDKKVEPKSCDKTHTCPPCPAPEAAGGPSVFLFPPKPKDTL
MISRTPEVTCVVV DVSHEDPEVKFNWYVDGVEVHNAKTKPREEQYNSTY
RVVSVLTVLHQDWLNGKEYKCKVSNKALP APIEKTISKAKGQPREPQVY
TLPPSRDELTKNQVSLWCLVKGFYPSDIAVEWESNGQPENNYKTT PPVL
DSDGSFFLYSKLTVDKSRWQQGNVFSCSVMHEALHNHYTQKSLSLSPGK

### > Seq 188: Adecatumumab-Nivolumab (EpCAM-PD-1)IgG1-KIH-LALA Monovalent Bispecific 1

[0844] > Light Chain 1:

ELQMTQSPSSLSASVGDRVTITCRTSQSISSYLNWYQQKPGQPPKLLIYW
ASTRESGVPDRFSGS GSGTDFTLTISSLQPEDSATYYCQQSYDIPYTFG
QGTKLEIKRTVAAPSVFIFPPSDEQLKSGTA SVVCLLNNFYPREAKVQW
KVDNALQSGNSQESVTEQDSKDSTYSLSSTLTLSKADYEKHKVYACE VT
HQGLSSPVTKSFNRGEC

### > Seq 189: Adecatumumab-Nivolumab (EpCAM-PD-1)IgG1-KIH-LALA Monovalent Bispecific 1

[0845] > Light Chain 2:

EIVLTQSPATLSLSPGERATLSCRASQSVSSYLAWYQQKPGQAPRLLIYD
ASNRATGIPARFSGS GSGTDFTLTISSLEPEDFAVYYCQQSSNWPRTFG
QGTKVEIKRTVAAPSVFIFPPSDEQLKSGTA SVVCLLNNFYPREAKVQW
KVDNALQSGNSQESVTEQDSKDSTYSLSSTLTLSKADYEKHKVYACE VT
HQGLSSPVTKSFNRGEC

### > Seq 190: Adecatumumab-Nivolumab IgG1-KIH-LALA Monovalent Bispecific 2

[0846] > Heavy Chain 1:

EVQLLESGGGVVQPGRSLRLSCAASGFTFSSYGMHWVRQAPGKGLEWVAV
ISYDGSNKYYADSVK GRFTISRDNSKNTLYLQMNSLRAEDTAVYYCAKD
MGWGSGWRPYYYYGMDVWGQGTTVTVSSAST KGPSVFPLAPSSKSTSGG
TAALGCLVKDYFPEPVTVSWNSGALTSGVHTFPAVLQSSGLYSLSSV VT
VPSSSLGTQTYICNVNHKPSNTKVDKKVEPKSCDKTHTCPPCPAPEAAGG
PSVFLFPPKPKDT LMISRTPEVTCVVVDVSHEDPEVKFNWYVDGVEVHN
AKTKPREEQYNSTYRVVSVLTVLHQDWLN GKEYKCKVSNKALPAPIEKT
ISKAKGQPREPQVYTLPPSRDELTKNQVSLWCLVKGFYPSDIAVE WESN
GQPENNYKTTPPVLDSDGSFFLYSKLTVDKSRWQQGNVFSCSVMHEALHN
HYTQKSLSLSP GK

### > Seq 191: Adecatumumab-Nivolumab (EpCAM-PD-1)IgG1-KIH-LALA Monovalent Bispecific 2

[0847] > Heavy Chain 2:

QVQLVESGGGVVQPGRSLRLDCKASGITFSNSGMHWVRQAPGKGLEWVAV
IWYDGSKRYYADSVK GRFTISRDNSKNTLFLQMNSLRAEDTAVYYCATN
DDYWGQGTLVTVSSASTKGPSVFPLAPSSKS TSGGTAALGCLVKDYFPE
PVTVSWNSGALTSGVHTFPAVLQSSGLYSLSSVVTVPSSSLGTQTYI CN
VNHKPSNTKVDKKVEPKSCDKTHTCPPCPAPEAAGGPSVFLFPPKPKDTL
MISRTPEVTCVVV DVSHEDPEVKFNWYVDGVEVHNAKTKPREEQYNSTY
RVVSVLTVLHQDWLNGKEYKCKVSNKALP APIEKTISKAKGQPREPQVY
TLPPSRDELTKNQVSLWCLVKGFYPSDIAVEWESNGQPENNYKTT PPVL
DSDGSFFLYSKLTVDKSRWQQGNVFSCSVMHEALHNHYTQKSLSLSPGK

### > Seq 192: Adecatumumab-Nivolumab (EpCAM-PD-1)IgG1-KIH-LALA Monovalent Bispecific 2

[0848] > Light Chain 1:

ELQMTQSPSSLSASVGDRVTITCRTSQSISSYLNWYQQKPGQPPKLLIYW
ASTRESGVPDRFSGS GSGTDFTLTISSLQPEDSATYYCQQSYDIPYTFG
QGTKLEIKRTVAAPSVFIFPPSDEQLKSGTA SVVCLLNNFYPREAKVQW
KVDNALQSGNSQESVTEQDSKDSTYSLSSTLTLSKADYEKHKVYACE VT
HQGLSSPVTKSFNRGEC

### > Seq 193: Adecatumumab-Nivolumab (EpCAM-PD-1)IgG1-KIH-LALA Monovalent Bispecific 2

[0849] > Light Chain 2:

EIVLTQSPATLSLSPGERATLSCRASQSVSSYLAWYQQKPGQAPRLLIYD
ASNRATGIPARFSGS GSGTDFTLTISSLEPEDFAVYYCQQSSNWPRTFG
QGTKVEIKRTVAAPSVFIFPPSDEQLKSGTA SVVCLLNNFYPREAKVQW
KVDNALQSGNSQESVTEQDSKDSTYSLSSTLTLSKADYEKHKVYACE VT
HQGLSSPVTKSFNRGEC

### > Seq 194: BB7.2-Pembrolizumab (HLA-A2-PD-1)IgG4-SPLE C-Terminal scFv Bivalent Bispecific sAg-PD-1 scFv Orientation 1

[0850] > Heavy Chain:

QVQLQQSGPELVKPGASVKMSCKASGYTFTSYHIQWVKQRPGQGLEWIGW
IYPGDGSTQYNEKFK GKTTLTADKSSSTAYMLLSSLTSEDSAIYFCARE
GTYYAMDYWGQGTSVTVSSASTKGPSVFPLA PCSRSTSESTAALGCLVK
DYFPEPVTVSWNSGALTSGVHTFPAVLQSSGLYSLSSVVTVPSSSLG TK
TYTCNVDHKPSNTKVDKRVESKYGPPCPSCPAPEFLGGPSVFLFPPKPKD
TLMISRTPEVTCV VVDVSQEDPEVQFNWYVDGVEVHNAKTKPREEQFNS
TYRVVSVLTVLHQDWLNGKEYKCKVSNKG LPSSIEKTISKAKGQPREPQ
VYTLPPSQEEMTKNQVSLTCLVKGFYPSDIAVEWESNGQPENNYK TTPP
VLDSDGSFFLYSRLTVDKSRWQEGNVFSCSVMHEALHNHYTQKSLSLSLG
KGGGGAGGGGQ VQLVQSGVEVKKPGASVKVSCKASGYTFTNYYMYWVRQ
APGQGLEWMGGINPSNGGTNFNEKFKN RVTLTTDSSTTTAYMELKSLQF
DDTAVYYCARRDYRFDMGFDYWGQGTTVTVSSGGGGSGGGGSG GGGSEI
VLTQSPATLSLSPGERATLSCRASKGVSTSGYSYLHWYQQKPGQAPRLLI
YLASYLESG VPARFSGSGSGTDFTLTISSLEPEDFAVYYCQHSRDLPLT
FGGGTKVEIK

### > Seq 195: BB7.2-Pembrolizumab (HLA-A2-PD-1)IgG4-SPLE C-Terminal scFv Bivalent Bispecific sAg-PD-1 scFv Orientation 1

[0851] > Light Chain:

DVLMTQTPLSLPVSLGDQVSISCRSSQSIVHSNGNTYLEWYLQKPGQSPK
LLIYKVSNRFSGVPD RFSGSGSGTDFTLKISRVEAEDLGVYYCFQGSHV
PRTFGGGTKLEIKRTVAAPSVFIFPPSDEQL KSGTASVVCLLNNFYPRE
AKVQWKVDNALQSGNSQESVTEQDSKDSTYSLSSTLTLSKADYEKHK VY
ACEVTHQGLSSPVTKSFNRGEC

### > Seq 196: BB7.2-Pembrolizumab IgG4-SPLE C-Terminal scFv Bivalent Bispecific sAg-PD-1 scFv Orientation 2

[0852] > Heavy Chain:

QVQLQQSGPELVKPGASVKMSCKASGYTFTSYHIQWVKQRPGQGLEWIGW
IYPGDGSTQYNEKFK GKTTLTADKSSSTAYMLLSSLTSEDSAIYFCARE
GTYYAMDYWGQGTSVTVSSASTKGPSVFPLA PCSRSTSESTAALGCLVK
DYFPEPVTVSWNSGALTSGVHTFPAVLQSSGLYSLSSVVTVPSSSLG TK
TYTCNVDHKPSNTKVDKRVESKYGPPCPSCPAPEFLGGPSVFLFPPKPKD
TLMISRTPEVTCV VVDVSQEDPEVQFNWYVDGVEVHNAKTKPREEQFNS
TYRVVSVLTVLHQDWLNGKEYKCKVSNKG LPSSIEKTISKAKGQPREPQ
VYTLPPSQEEMTKNQVSLTCLVKGFYPSDIAVEWESNGQPENNYK TTPP
VLDSDGSFFLYSRLTVDKSRWQEGNVFSCSVMHEALHNHYTQKSLSLSLG
KGGGGAGGGGE IVLTQSPATLSLSPGERATLSCRASKGVSTSGYSYLHW
YQQKPGQAPRLLIYLASYLESGVPARF SGSGSGTDFTLTISSLEPEDFA
VYYCQHSRDLPLTFGGGTKVEIKGGGGSGGGGSGGGGSQVQLV QSGVEV
KKPGASVKVSCKASGYTFTNYYMYWVRQAPGQGLEWMGGINPSNGGTNFN
EKFKNRVTL TTDSSTTTAYMELKSLQFDDTAVYYCARRDYRFDMGFDYW
GQGTTVTVSS

### > Seq 197: BB7.2-Pembrolizumab (HLA-A2-PD-1)IgG4-SPLE C-Terminal scFv Bivalent Bispecific sAg-PD-1 scFv Orientation 2

[0853] > Light Chain:

DVLMTQTPLSLPVSLGDQVSISCRSSQSIVHSNGNTYLEWYLQKPGQSPK
LLIYKVSNRFSGVPD RFSGSGSGTDFTLKISRVEAEDLGVYYCFQGSHV
PRTFGGGTKLEIKRTVAAPSVFIFPPSDEQL KSGTASVVCLLNNFYPRE
AKVQWKVDNALQSGNSQESVTEQDSKDSTYSLSSTLTLSKADYEKHK VY
ACEVTHQGLSSPVTKSFNRGEC

### > Seq 198: BB7.2-Pembrolizumab IgG4-SPLE C-Terminal scFv Bivalent Bispecific PD-1-sAg scFv Orientation 1

[0854] > Heavy Chain:

QVQLVQSGVEVKKPGASVKVSCKASGYTFTNYYMYWVRQAPGQGLEWMGG
INPSNGGTNFNEKFK NRVTLTTDSSTTTAYMELKSLQFDDTAVYYCARR
DYRFDMGFDYWGQGTTVTVSSASTKGPSVFP LAPCSRSTSESTAALGCL
VKDYFPEPVTVSWNSGALTSGVHTFPAVLQSSGLYSLSSVVTVPSSS LG
TKTYTCNVDHKPSNTKVDKRVESKYGPPCPSCPAPEFLGGPSVFLFPPKP
KDTLMISRTPEVT CVVVDVSQEDPEVQFNWYVDGVEVHNAKTKPREEQF
NSTYRVVSVLTVLHQDWLNGKEYKCKVSN KGLPSSIEKTISKAKGQPRE
PQVYTLPPSQEEMTKNQVSLTCLVKGFYPSDIAVEWESNGQPENN YKTT
PPVLDSDGSFFLYSRLTVDKSRWQEGNVFSCSVMHEALHNHYTQKSLSLS
LGKGGGGAGGG GQVQLQQSGPELVKPGASVKMSCKASGYTFTSYHIQWV
KQRPGQGLEWIGWIYPGDGSTQYNEKF KGKTTLTADKSSSTAYMLLSSL
TSEDSAIYFCAREGTYYAMDYWGQGTSVTVSSGGGGSGGGGSG GGGSDV
LMTQTPLSLPVSLGDQVSISCRSSQSIVHSNGNTYLEWYLQKPGQSPKLL
IYKVSNRFS GVPDRFSGSGSGTDFTLKISRVEAEDLGVYYCFQGSHVPR
TFGGGTKLEIK

### > Seq 199: BB7.2-Pembrolizumab (HLA-A2-PD-1)IgG4-SPLE C-Terminal scFv Bivalent Bispecific PD-1-sAg scFv Orientation 1

[0855] > Light Chain:

EIVLTQSPATLSLSPGERATLSCRASKGVSTSGYSYLHWYQQKPGQAPRL
LIYLASYLESGVPAR FSGSGSGTDFTLTISSLEPEDFAVYYCQHSRDLP
LTFGGGTKVEIKRTVAAPSVFIFPPSDEQLK SGTASVVCLLNNFYPREA
KVQWKVDNALQSGNSQESVTEQDSKDSTYSLSSTLTLSKADYEKHKV YA
CEVTHQGLSSPVTKSFNRGEC

### > Seq 200: BB7.2-Pembrolizumab IgG4-SPLE C-Terminal scFv Bivalent Bispecific PD1-sAg scFv Orientation 2

[0856] > Heavy Chain:

QVQLVQSGVEVKKPGASVKVSCKASGYTFTNYYMYWVRQAPGQGLEWMGG
INPSNGGTNFNEKFK NRVTLTTDSSTTTAYMELKSLQFDDTAVYYCARR
DYRFDMGFDYWGQGTTVTVSSASTKGPSVFP LAPCSRSTSESTAALGCL
VKDYFPEPVTVSWNSGALTSGVHTFPAVLQSSGLYSLSSVVTVPSSS LG
TKTYTCNVDHKPSNTKVDKRVESKYGPPCPSCPAPEFLGGPSVFLFPPKP
KDTLMISRTPEVT CVVVDVSQEDPEVQFNWYVDGVEVHNAKTKPREEQF
NSTYRVVSVLTVLHQDWLNGKEYKCKVSN KGLPSSIEKTISKAKGQPRE
PQVYTLPPSQEEMTKNQVSLTCLVKGFYPSDIAVEWESNGQPENN YKTT
PPVLDSDGSFFLYSRLTVDKSRWQEGNVFSCSVMHEALHNHYTQKSLSLS
LGKGGGGAGGG GDVLMTQTPLSLPVSLGDQVSISCRSSQSIVHSNGNTY
LEWYLQKPGQSPKLLIYKVSNRFSGVP DRFSGSGSGTDFTLKISRVEAE
DLGVYYCFQGSHVPRTFGGGTKLEIKGGGGSGGGGSGGGGSQV QLQQSG
PELVKPGASVKMSCKASGYTFTSYHIQWVKQRPGQGLEWIGWIYPGDGST
QYNEKFKGK TTLTADKSSSTAYMLLSSLTSEDSAIYFCAREGTYYAMDY
WGQGTSVTVSS

### > Seq 201: BB7.2-Pembrolizumab (HLA-A2-PD-1)IgG4-SPLE C-Terminal scFv Bivalent Bispecific PD1-sAg scFv Orientation 2

[0857] > Light Chain:

EIVLTQSPATLSLSPGERATLSCRASKGVSTSGYSYLHWYQQKPGQAPRL
LIYLASYLESGVPAR FSGSGSGTDFTLTISSLEPEDFAVYYCQHSRDLP
LTFGGGTKVEIKRTVAAPSVFIFPPSDEQLK SGTASVVCLLNNFYPREA
KVQWKVDNALQSGNSQESVTEQDSKDSTYSLSSTLTLSKADYEKHKV YA
CEVTHQGLSSPVTKSFNRGEC

### > Seq 202: BB7.2-Pembrolizumab IgG1-KIH-LALA C-Terminal scFv PD1 Monovalent, sAg Bivalent Bispecific 1

[0858] > Heavy Chain 1:

QVQLQQSGPELVKPGASVKMSCKASGYTFTSYHIQWVKQRPGQGLEWIGW
IYPGDGSTQYNEKFK GKTTLTADKSSSTAYMLLSSLTSEDSAIYFCARE
GTYYAMDYWGQGTSVTVSSASTKGPSVFPLA PSSKSTSGGTAALGCLVK
DYFPEPVTVSWNSGALTSGVHTFPAVLQSSGLYSLSSVVTVPSSSLG TQ
TYICNVNHKPSNTKVDKKVEPKSCDKTHTCPPCPAPEAAGGPSVFLFPPK
PKDTLMISRTPEV TCVVVDVSHEDPEVKFNWYVDGVEVHNAKTKPREEQ
YNSTYRVVSVLTVLHQDWLNGKEYKCKVS NKALPAPIEKTISKAKGQPR
EPQVYTLPPSRDELTKNQVSLWCLVKGFYPSDIAVEWESNGQPEN NYKT
TPPVLDSDGSFFLYSKLTVDKSRWQQGNVFSCSVMHEALHNHYTQKSLSL
SPGKGGGGAGG GGQVQLVQSGVEVKKPGASVKVSCKASGYTFTNYYMYW
VRQAPGQGLEWMGGINPSNGGTNFNEK FKNRVTLTTDSSTTTAYMELKS
LQFDDTAVYYCARRDYRFDMGFDYWGQGTTVTVSSGGGGSGGG GSGGGG
SEIVLTQSPATLSLSPGERATLSCRASKGVSTSGYSYLHWYQQKPGQAPR
LLIYLASYL ESGVPARFSGSGSGTDFTLTISSLEPEDFAVYYCQHSRDL
PLTFGGGTKVEIK

### > Seq 203: BB7.2-Pembrolizumab IgG1-KIH-LALA C-Terminal scFv PD1 Monovalent, sAg Bivalent Bispecific 1

[0859] > Heavy Chain 2:

QVQLQQSGPELVKPGASVKMSCKASGYTFTSYHIQWVKQRPGQGLEWIGW
IYPGDGSTQYNEKFK GKTTLTADKSSSTAYMLLSSLTSEDSAIYFCARE
GTYYAMDYWGQGTSVTVSSASTKGPSVFPLA PSSKSTSGGTAALGCLVK
DYFPEPVTVSWNSGALTSGVHTFPAVLQSSGLYSLSSVVTVPSSSLG TQ
TYICNVNHKPSNTKVDKKVEPKSCDKTHTCPPCPAPEAAGGPSVFLFPPK
PKDTLMISRTPEV TCVVVDVSHEDPEVKFNWYVDGVEVHNAKTKPREEQ
YNSTYRVVSVLTVLHQDWLNGKEYKCKVS NKALPAPIEKTISKAKGQPR
EPQVYTLPPSRDELTKNQVSLWCLVKGFYPSDIAVEWESNGQPEN NYKT
TPPVLDSDGSFFLYSKLTVDKSRWQQGNVFSCSVMHEALHNHYTQKSLSL
SPGK

### > Seq 204: BB7.2-Pembrolizumab (HLA-A2-PD-1)IgG1-KIH-LALA C-Terminal scFv PD1 Monovalent, sAg Bivalent Bispecific 1

[0860] > Light Chain:

DVLMTQTPLSLPVSLGDQVSISCRSSQSIVHSNGNTYLEWYLQKPGQSPK
LLIYKVSNRFSGVPD RFSGSGSGTDFTLKISRVEAEDLGVYYCFQGSHV
PRTFGGGTKLEIKRTVAAPSVFIFPPSDEQL KSGTASVVCLLNNFYPRE
AKVQWKVDNALQSGNSQESVTEQDSKDSTYSLSSTLTLSKADYEKHK VY
ACEVTHQGLSSPVTKSFNRGEC

### > Seq 205: BB7.2-Pembrolizumab IgG1-KIH-LALA C-Terminal scFv PD1 Monovalent, sAg Bivalent Bispecific 2

[0861] > Heavy Chain 1:

QVQLQQSGPELVKPGASVKMSCKASGYTFTSYHIQWVKQRPGQGLEWIGW
IYPGDGSTQYNEKFK GKTTLTADKSSSTAYMLLSSLTSEDSAIYFCARE
GTYYAMDYWGQGTSVTVSSASTKGPSVFPLA PSSKSTSGGTAALGCLVK
DYFPEPVTVSWNSGALTSGVHTFPAVLQSSGLYSLSSVVTVPSSSLG TQ
TYICNVNHKPSNTKVDKKVEPKSCDKTHTCPPCPAPEAAGGPSVFLFPPK
PKDTLMISRTPEV TCVVVDVSHEDPEVKFNWYVDGVEVHNAKTKPREEQ
YNSTYRVVSVLTVLHQDWLNGKEYKCKVS NKALPAPIEKTISKAKGQPR
EPQVYTLPPSRDELTKNQVSLWCLVKGFYPSDIAVEWESNGQPEN NYKT
TPPVLDSDGSFFLYSKLTVDKSRWQQGNVFSCSVMHEALHNHYTQKSLSL
SPGKGGGGAGG GGEIVLTQSPATLSLSPGERATLSCRASKGVSTSGYSY
LHWYQQKPGQAPRLLIYLASYLESGVP ARFSGSGSGTDFTLTISSLEPE
DFAVYYCQHSRDLPLTFGGGTKVEIKGGGGSGGGGSGGGGSQV QLVQSG
VEVKKPGASVKVSCKASGYTFTNYYMYWVRQAPGQGLEWMGGINPSNGGT
NFNEKFKNR VTLTTDSSTTTAYMELKSLQFDDTAVYYCARRDYRFDMGF
DYWGQGTTVTVSS

### > Seq 205: BB7.2-Pembrolizumab IgG1-KIH-LALA C-Terminal scFv PD1 Monovalent, sAg Bivalent Bispecific 2

[0862] > Heavy Chain 2:

QVQLQQSGPELVKPGASVKMSCKASGYTFTSYHIQWVKQRPGQGLEWIGW
IYPGDGSTQYNEKFK GKTTLTADKSSSTAYMLLSSLTSEDSAIYFCARE
GTYYAMDYWGQGTSVTVSSASTKGPSVFPLA PSSKSTSGGTAALGCLVK
DYFPEPVTVSWNSGALTSGVHTFPAVLQSSGLYSLSSVVTVPSSSLG TQ
TYICNVNHKPSNTKVDKKVEPKSCDKTHTCPPCPAPEAAGGPSVFLFPPK
PKDTLMISRTPEV TCVVVDVSHEDPEVKFNWYVDGVEVHNAKTKPREEQ
YNSTYRVVSVLTVLHQDWLNGKEYKCKVS NKALPAPIEKTISKAKGQPR
EPQVYTLPPSRDELTKNQVSLWCLVKGFYPSDIAVEWESNGQPEN NYKT
TPPVLDSDGSFFLYSKLTVDKSRWQQGNVFSCSVMHEALHNHYTQKSLSL
SPGK

### > Seq 206: BB7.2-Pembrolizumab (HLA-A2-PD-1)IgG1-KIH-LALA C-Terminal scFv PD1 Monovalent, sAg Bivalent Bispecific 2

[0863] > Light Chain:

DVLMTQTPLSLPVSLGDQVSISCRSSQSIVHSNGNTYLEWYLQKPGQSPK
LLIYKVSNRFSGVPD RFSGSGSGTDFTLKISRVEAEDLGVYYCFQGSHV
PRTFGGGTKLEIKRTVAAPSVFIFPPSDEQL KSGTASVVCLLNNFYPRE
AKVQWKVDNALQSGNSQESVTEQDSKDSTYSLSSTLTLSKADYEKHK VY
ACEVTHQGLSSPVTKSFNRGEC

### > Seq 207: BB7.2-Pembrolizumab IgG1-KIH-LALA C-Terminal scFv PD1 Monovalent, sAg Bivalent Bispecific 3

[0864] > Heavy Chain 1:

QVQLQQSGPELVKPGASVKMSCKASGYTFTSYHIQWVKQRPGQGLEWIGW
IYPGDGSTQYNEKFK GKTTLTADKSSSTAYMLLSSLTSEDSAIYFCARE
GTYYAMDYWGQGTSVTVSSASTKGPSVFPLA PSSKSTSGGTAALGCLVK
DYFPEPVTVSWNSGALTSGVHTFPAVLQSSGLYSLSSVVTVPSSSLG TQ
TYICNVNHKPSNTKVDKKVEPKSCDKTHTCPPCPAPEAAGGPSVFLFPPK
PKDTLMISRTPEV TCVVVDVSHEDPEVKFNWYVDGVEVHNAKTKPREEQ
YNSTYRVVSVLTVLHQDWLNGKEYKCKVS NKALPAPIEKTISKAKGQPR
EPQVYTLPPSRDELTKNQVSLWCLVKGFYPSDIAVEWESNGQPEN NYKT
TPPVLDSDGSFFLYSKLTVDKSRWQQGNVFSCSVMHEALHNHYTQKSLSL
SPGKGGGGAGG GGQVQLVQSGVEVKKPGASVKVSCKASGYTFTNYYMYW
VRQAPGQGLEWMGGINPSNGGTNFNEK FKNRVTLTTDSSTTTAYMELKS
LQFDDTAVYYCARRDYRFDMGFDYWGQGTTVTVSSGGGGSGGG GSGGGG
SEIVLTQSPATLSLSPGERATLSCRASKGVSTSGYSYLHWYQQKPGQAPR
LLIYLASYL ESGVPARFSGSGSGTDFTLTISSLEPEDFAVYYCQHSRDL
PLTFGGGTKVEIK

### > Seq 208: BB7.2-Pembrolizumab IgG1-KIH-LALA C-Terminal scFv PD1 Monovalent, sAg Bivalent Bispecific 3

[0865] > Heavy Chain 2:

QVQLQQSGPELVKPGASVKMSCKASGYTFTSYHIQWVKQRPGQGLEWIGW
IYPGDGSTQYNEKFK GKTTLTADKSSSTAYMLLSSLTSEDSAIYFCARE
GTYYAMDYWGQGTSVTVSSASTKGPSVFPLA PSSKSTSGGTAALGCLVK
DYFPEPVTVSWNSGALTSGVHTFPAVLQSSGLYSLSSVVTVPSSSLG TQ
TYICNVNHKPSNTKVDKKVEPKSCDKTHTCPPCPAPEAAGGPSVFLFPPK
PKDTLMISRTPEV TCVVVDVSHEDPEVKFNWYVDGVEVHNAKTKPREEQ
YNSTYRVVSVLTVLHQDWLNGKEYKCKVS NKALPAPIEKTISKAKGQPR
EPQVYTLPPSRDELTKNQVSLWCLVKGFYPSDIAVEWESNGQPEN NYKT
TPPVLDSDGSFFLYSKLTVDKSRWQQGNVFSCSVMHEALHNHYTQKSLSL
SPGK

### > Seq 209: BB7.2-Pembrolizumab (HLA-A2-PD-1)IgG1-KIH-LALA C-Terminal scFv PD1 Monovalent, sAg Bivalent Bispecific 3

[0866] > Light Chain:

DVLMTQTPLSLPVSLGDQVSISCRSSQSIVHSNGNTYLEWYLQKPGQSPK
LLIYKVSNRFSGVPD RFSGSGSGTDFTLKISRVEAEDLGVYYCFQGSHV
PRTFGGGTKLEIKRTVAAPSVFIFPPSDEQL KSGTASVVCLLNNFYPRE
AKVQWKVDNALQSGNSQESVTEQDSKDSTYSLSSTLTLSKADYEKHK VY
ACEVTHQGLSSPVTKSFNRGEC

### > Seq 210: BB7.2-Pembrolizumab IgG1-KIH-LALA C-Terminal scFv PD1 Monovalent, sAg Bivalent Bispecific 4

[0867] > Heavy Chain 1:

QVQLQQSGPELVKPGASVKMSCKASGYTFTSYHIQWVKQRPGQGLEWIGW
IYPGDGSTQYNEKFK GKTTLTADKSSSTAYMLLSSLTSEDSAIYFCARE
GTYYAMDYWGQGTSVTVSSASTKGPSVFPLA PSSKSTSGGTAALGCLVK
DYFPEPVTVSWNSGALTSGVHTFPAVLQSSGLYSLSSVVTVPSSSLG TQ
TYICNVNHKPSNTKVDKKVEPKSCDKTHTCPPCPAPEAAGGPSVFLFPPK
PKDTLMISRTPEV TCVVVDVSHEDPEVKFNWYVDGVEVHNAKTKPREEQ
YNSTYRVVSVLTVLHQDWLNGKEYKCKVS NKALPAPIEKTISKAKGQPR
EPQVYTLPPSRDELTKNQVSLWCLVKGFYPSDIAVEWESNGQPEN NYKT
TPPVLDSDGSFFLYSKLTVDKSRWQQGNVFSCSVMHEALHNHYTQKSLSL
SPGKGGGGAGG GGEIVLTQSPATLSLSPGERATLSCRASKGVSTSGYSY
LHWYQQKPGQAPRLLIYLASYLESGVP ARFSGSGSGTDFTLTISSLEPE
DFAVYYCQHSRDLPLTFGGGTKVEIKGGGGSGGGGSGGGGSQV QLVQSG
VEVKKPGASVKVSCKASGYTFTNYYMYWVRQAPGQGLEWMGGINPSNGGT
NFNEKFKNR VTLTTDSSTTTAYMELKSLQFDDTAVYYCARRDYRFDMGF
DYWGQGTTVTVSS

### > Seq 211: BB7.2-Pembrolizumab (HLA-A2-PD-1)IgG1-KIH-LALA C-Terminal scFv PD1 Monovalent, sAg Bivalent Bispecific 4

[0868] > Heavy Chain 2:

QVQLQQSGPELVKPGASVKMSCKASGYTFTSYHIQWVKQRPGQGLEWIGW
IYPGDGSTQYNEKFK GKTTLTADKSSSTAYMLLSSLTSEDSAIYFCARE
GTYYAMDYWGQGTSVTVSSASTKGPSVFPLA PSSKSTSGGTAALGCLVK
DYFPEPVTVSWNSGALTSGVHTFPAVLQSSGLYSLSSVVTVPSSSLG TQ
TYICNVNHKPSNTKVDKKVEPKSCDKTHTCPPCPAPEAAGGPSVFLFPPK
PKDTLMISRTPEV TCVVVDVSHEDPEVKFNWYVDGVEVHNAKTKPREEQ
YNSTYRVVSVLTVLHQDWLNGKEYKCKVS NKALPAPIEKTISKAKGQPR
EPQVYTLPPSRDELTKNQVSLWCLVKGFYPSDIAVEWESNGQPEN NYKT
TPPVLDSDGSFFLYSKLTVDKSRWQQGNVFSCSVMHEALHNHYTQKSLSL
SPGK

### > Seq 212: BB7.2-Pembrolizumab (HLA-A2-PD-1)IgG1-KIH-LALA C-Terminal scFv PD1 Monovalent, sAg Bivalent Bispecific 4

[0869] > Light Chain:

DVLMTQTPLSLPVSLGDQVSISCRSSQSIVHSNGNTYLEWYLQKPGQSPK
LLIYKVSNRFSGVPD RFSGSGSGTDFTLKISRVEAEDLGVYYCFQGSHV
PRTFGGGTKLEIKRTVAAPSVFIFPPSDEQL KSGTASVVCLLNNFYPRE
AKVQWKVDNALQSGNSQESVTEQDSKDSTYSLSSTLTLSKADYEKHK VY
ACEVTHQGLSSPVTKSFNRGEC

### > Seq 213: BB7.2-Pembrolizumab IgG1-KIH-LALA Monovalent Bispecific 1

[0870] > Heavy Chain 1:

QVQLQQSGPELVKPGASVKMSCKASGYTFTSYHIQWVKQRPGQGLEWIGW
IYPGDGSTQYNEKFK GKTTLTADKSSSTAYMLLSSLTSEDSAIYFCARE
GTYYAMDYWGQGTSVTVSSASTKGPSVFPLA PSSKSTSGGTAALGCLVK
DYFPEPVTVSWNSGALTSGVHTFPAVLQSSGLYSLSSVVTVPSSSLG TQ
TYICNVNHKPSNTKVDKKVEPKSCDKTHTCPPCPAPEAAGGPSVFLFPPK
PKDTLMISRTPEV TCVVVDVSHEDPEVKFNWYVDGVEVHNAKTKPREEQ
YNSTYRVVSVLTVLHQDWLNGKEYKCKVS NKALPAPIEKTISKAKGQPR
EPQVYTLPPSRDELTKNQVSLWCLVKGFYPSDIAVEWESNGQPEN NYKT
TPPVLDSDGSFFLYSKLTVDKSRWQQGNVFSCSVMHEALHNHYTQKSLSL
SPGK

### > Seq 214: BB7.2-Pembrolizumab (HLA-A2-PD-1)IgG1-KIH-LALA Monovalent Bispecific 1

[0871] > Heavy Chain 2:

QVQLVQSGVEVKKPGASVKVSCKASGYTFTNYYMYWVRQAPGQGLEWMGG
INPSNGGTNFNEKFK NRVTLTTDSSTTTAYMELKSLQFDDTAVYYCARR
DYRFDMGFDYWGQGTTVTVSSASTKGPSVFP LAPSSKSTSGGTAALGCL
VKDYFPEPVTVSWNSGALTSGVHTFPAVLQSSGLYSLSSVVTVPSSS LG
TQTYICNVNHKPSNTKVDKKVEPKSCDKTHTCPPCPAPEAAGGPSVFLFP
PKPKDTLMISRTP EVTCVVVDVSHEDPEVKFNWYVDGVEVHNAKTKPRE
EQYNSTYRVVSVLTVLHQDWLNGKEYKCK VSNKALPAPIEKTISKAKGQ
PREPQVYTLPPSRDELTKNQVSLWCLVKGFYPSDIAVEWESNGQP ENNY
KTTPPVLDSDGSFFLYSKLTVDKSRWQQGNVFSCSVMHEALHNHYTQKSL
SLSPGK

### > Seq 215: BB7.2-Pembrolizumab (HLA-A2-PD-1)IgG1-KIH-LALA Monovalent Bispecific 1

[0872] > Light Chain 1:

DVLMTQTPLSLPVSLGDQVSISCRSSQSIVHSNGNTYLEWYLQKPGQSPK
LLIYKVSNRFSGVPD RFSGSGSGTDFTLKISRVEAEDLGVYYCFQGSHV
PRTFGGGTKLEIKRTVAAPSVFIFPPSDEQL KSGTASVVCLLNNFYPRE
AKVQWKVDNALQSGNSQESVTEQDSKDSTYSLSSTLTLSKADYEKHK VY
ACEVTHQGLSSPVTKSFNRGEC

### > Seq 216: BB7.2-Pembrolizumab (HLA-A2-PD-1)IgG1-KIH-LALA Monovalent Bispecific 1

[0873] > Light Chain 2:

EIVLTQSPATLSLSPGERATLSCRASKGVSTSGYSYLHWYQQKPGQAPRL
LIYLASYLESGVPAR FSGSGSGTDFTLTISSLEPEDFAVYYCQHSRDLP
LTFGGGTKVEIKRTVAAPSVFIFPPSDEQLK SGTASVVCLLNNFYPREA
KVQWKVDNALQSGNSQESVTEQDSKDSTYSLSSTLTLSKADYEKHKV YA
CEVTHQGLSSPVTKSFNRGEC

### > Seq 217: BB7.2-Pembrolizumab IgG1-KIH-LALA Monovalent Bispecific 2

[0874] > Heavy Chain 1:

QVQLQQSGPELVKPGASVKMSCKASGYTFTSYHIQWVKQRPGQGLEWIGW
IYPGDGSTQYNEKFK GKTTLTADKSSSTAYMLLSSLTSEDSAIYFCARE
GTYYAMDYWGQGTSVTVSSASTKGPSVFPLA PSSKSTSGGTAALGCLVK
DYFPEPVTVSWNSGALTSGVHTFPAVLQSSGLYSLSSVVTVPSSSLG TQ
TYICNVNHKPSNTKVDKKVEPKSCDKTHTCPPCPAPEAAGGPSVFLFPPK
PKDTLMISRTPEV TCVVVDVSHEDPEVKFNWYVDGVEVHNAKTKPREEQ
YNSTYRVVSVLTVLHQDWLNGKEYKCKVS NKALPAPIEKTISKAKGQPR
EPQVYTLPPSRDELTKNQVSLWCLVKGFYPSDIAVEWESNGQPEN NYKT
TPPVLDSDGSFFLYSKLTVDKSRWQQGNVFSCSVMHEALHNHYTQKSLSL
SPGK

### > Seq 218: BB7.2-Pembrolizumab (HLA-A2-PD-1)IgG1-KIH-LALA Monovalent Bispecific 2

[0875] > Heavy Chain 2:

QVQLVQSGVEVKKPGASVKVSCKASGYTFTNYYMYWVRQAPGQGLEWMGG
INPSNGGTNFNEKFK NRVTLTTDSSTTTAYMELKSLQFDDTAVYYCARR
DYRFDMGFDYWGQGTTVTVSSASTKGPSVFP LAPSSKSTSGGTAALGCL
VKDYFPEPVTVSWNSGALTSGVHTFPAVLQSSGLYSLSSVVTVPSSS LG
TQTYICNVNHKPSNTKVDKKVEPKSCDKTHTCPPCPAPEAAGGPSVFLFP
PKPKDTLMISRTP EVTCVVVDVSHEDPEVKFNWYVDGVEVHNAKTKPRE
EQYNSTYRVVSVLTVLHQDWLNGKEYKCK VSNKALPAPIEKTISKAKGQ
PREPQVYTLPPSRDELTKNQVSLWCLVKGFYPSDIAVEWESNGQP ENNY
KTTPPVLDSDGSFFLYSKLTVDKSRWQQGNVFSCSVMHEALHNHYTQKSL
SLSPGK

### > Seq 219: BB7.2-Pembrolizumab (HLA-A2-PD-1)IgG1-KIH-LALA Monovalent Bispecific 2

[0876] > Light Chain 1:

DVLMTQTPLSLPVSLGDQVSISCRSSQSIVHSNGNTYLEWYLQKPGQSPK
LLIYKVSNRFSGVPD RFSGSGSGTDFTLKISRVEAEDLGVYYCFQGSHV
PRTFGGGTKLEIKRTVAAPSVFIFPPSDEQL KSGTASVVCLLNNFYPRE
AKVQWKVDNALQSGNSQESVTEQDSKDSTYSLSSTLTLSKADYEKHK VY
ACEVTHQGLSSPVTKSFNRGEC

### > Seq 220: BB7.2-Pembrolizumab (HLA-A2-PD-1)IgG1-KIH-LALA Monovalent Bispecific 2

[0877] > Light Chain 2:

EIVLTQSPATLSLSPGERATLSCRASKGVSTSGYSYLHWYQQKPGQAPRL
LIYLASYLESGVPAR FSGSGSGTDFTLTISSLEPEDFAVYYCQHSRDLP
LTFGGGTKVEIKRTVAAPSVFIFPPSDEQLK SGTASVVCLLNNFYPREA
KVQWKVDNALQSGNSQESVTEQDSKDSTYSLSSTLTLSKADYEKHKV YA
CEVTHQGLSSPVTKSFNRGEC

### > Seq 221: BB7.2-Nivolumab (HLA-A2-PD-1)IgG4-SPLE C-Terminal scFv Bivalent Bispecific sAg-PD-1 scFv Orientation 1

[0878] > Heavy Chain:

QVQLQQSGPELVKPGASVKMSCKASGYTFTSYHIQWVKQRPGQGLEWIGW
IYPGDGSTQYNEKFK GKTTLTADKSSSTAYMLLSSLTSEDSAIYFCARE
GTYYAMDYWGQGTSVTVSSASTKGPSVFPLA PCSRSTSESTAALGCLVK
DYFPEPVTVSWNSGALTSGVHTFPAVLQSSGLYSLSSVVTVPSSSLG TK
TYTCNVDHKPSNTKVDKRVESKYGPPCPSCPAPEFLGGPSVFLFPPKPKD
TLMISRTPEVTCV VVDVSQEDPEVQFNWYVDGVEVHNAKTKPREEQFNS
TYRVVSVLTVLHQDWLNGKEYKCKVSNKG LPSSIEKTISKAKGQPREPQ
VYTLPPSQEEMTKNQVSLTCLVKGFYPSDIAVEWESNGQPENNYK TTPP
VLDSDGSFFLYSRLTVDKSRWQEGNVFSCSVMHEALHNHYTQKSLSLSLG
KGGGGAGGGGQ VQLVESGGGVVQPGRSLRLDCKASGITFSNSGMHWVRQ
APGKGLEWVAVIWYDGSKRYYADSVKG RFTISRDNSKNTLFLQMNSLRA
EDTAVYYCATNDDYWGQGTLVTVSSGGGGSGGGGSGGGGSEIV LTQSPA
TLSLSPGERATLSCRASQSVSSYLAWYQQKPGQAPRLLIYDASNRATGIP
ARFSGSGSG TDFTLTISSLEPEDFAVYYCQQSSNWPRTFGQGTKVEIK

### > Seq 222: BB7.2-Nivolumab (HLA-A2-PD-1)IgG4-SPLE C-Terminal scFv Bivalent Bispecific sAg-PD-1 scFv Orientation 1

[0879] > Light Chain:

DVLMTQTPLSLPVSLGDQVSISCRSSQSIVHSNGNTYLEWYLQKPGQSPK
LLIYKVSNRFSGVPD RFSGSGSGTDFTLKISRVEAEDLGVYYCFQGSHV
PRTFGGGTKLEIKRTVAAPSVFIFPPSDEQL KSGTASVVCLLNNFYPRE
AKVQWKVDNALQSGNSQESVTEQDSKDSTYSLSSTLTLSKADYEKHK VY
ACEVTHQGLSSPVTKSFNRGEC

### > Seq 223: BB7.2-Nivolumab IgG4-SPLE C-Terminal scFv Bivalent Bispecific sAg-PD-1 scFv Orientation 2

[0880] > Heavy Chain:

QVQLQQSGPELVKPGASVKMSCKASGYTFTSYHIQWVKQRPGQGLEWIGW
IYPGDGSTQYNEKFK GKTTLTADKSSSTAYMLLSSLTSEDSAIYFCARE
GTYYAMDYWGQGTSVTVSSASTKGPSVFPLA PCSRSTSESTAALGCLVK
DYFPEPVTVSWNSGALTSGVHTFPAVLQSSGLYSLSSVVTVPSSSLG TK
TYTCNVDHKPSNTKVDKRVESKYGPPCPSCPAPEFLGGPSVFLFPPKPKD
TLMISRTPEVTCV VVDVSQEDPEVQFNWYVDGVEVHNAKTKPREEQFNS
TYRVVSVLTVLHQDWLNGKEYKCKVSNKG LPSSIEKTISKAKGQPREPQ
VYTLPPSQEEMTKNQVSLTCLVKGFYPSDIAVEWESNGQPENNYK TTPP
VLDSDGSFFLYSRLTVDKSRWQEGNVFSCSVMHEALHNHYTQKSLSLSLG
KGGGGAGGGGE IVLTQSPATLSLSPGERATLSCRASQSVSSYLAWYQQK
PGQAPRLLIYDASNRATGIPARFSGSG SGTDFTLTISSLEPEDFAVYYC
QQSSNWPRTFGQGTKVEIKGGGGSGGGGSGGGGSQVQLVESGG GVVQPG
RSLRLDCKASGITFSNSGMHWVRQAPGKGLEWVAVIWYDGSKRYYADSVK
GRFTISRDN SKNTLFLQMNSLRAEDTAVYYCATNDDYWGQGTLVTVSS

### > Seq 224: BB7.2-Nivolumab (HLA-A2-PD-1)IgG4-SPLE C-Terminal scFv Bivalent Bispecific sAg-PD-1 scFv Orientation 2

[0881] > Light Chain:

DVLMTQTPLSLPVSLGDQVSISCRSSQSIVHSNGNTYLEWYLQKPGQSPK
LLIYKVSNRFSGVPD RFSGSGSGTDFTLKISRVEAEDLGVYYCFQGSHV
PRTFGGGTKLEIKRTVAAPSVFIFPPSDEQL KSGTASVVCLLNNFYPRE
AKVQWKVDNALQSGNSQESVTEQDSKDSTYSLSSTLTLSKADYEKHK VY
ACEVTHQGLSSPVTKSFNRGEC

### > Seq 225: BB7.2-Nivolumab IgG4-SPLE C-Terminal scFv Bivalent Bispecific PD-1-sAg scFv Orientation 1

[0882] > Heavy Chain:

QVQLVESGGGVVQPGRSLRLDCKASGITFSNSGMHWVRQAPGKGLEWVAV
IWYDGSKRYYADSVK GRFTISRDNSKNTLFLQMNSLRAEDTAVYYCATN
DDYWGQGTLVTVSSASTKGPSVFPLAPCSRS TSESTAALGCLVKDYFPE
PVTVSWNSGALTSGVHTFPAVLQSSGLYSLSSVVTVPSSSLGTKTYT CN
VDHKPSNTKVDKRVESKYGPPCPSCPAPEFLGGPSVFLFPPKPKDTLMIS
RTPEVTCVVVDVS QEDPEVQFNWYVDGVEVHNAKTKPREEQFNSTYRVV
SVLTVLHQDWLNGKEYKCKVSNKGLPSSI EKTISKAKGQPREPQVYTLP
PSQEEMTKNQVSLTCLVKGFYPSDIAVEWESNGQPENNYKTTPPV LDSD
GSFFLYSRLTVDKSRWQEGNVFSCSVMHEALHNHYTQKSLSLSLGKGGGG
AGGGGQVQLQQ SGPELVKPGASVKMSCKASGYTFTSYHIQWVKQRPGQG
LEWIGWIYPGDGSTQYNEKFKGKTTLT ADKSSSTAYMLLSSLTSEDSAI
YFCAREGTYYAMDYWGQGTSVTVSSGGGGSGGGGSGGGGSDVL MTQTPL
SLPVSLGDQVSISCRSSQSIVHSNGNTYLEWYLQKPGQSPKLLIYKVSNR
FSGVPDRFS GSGSGTDFTLKISRVEAEDLGVYYCFQGSHVPRTFGGGTK
LEIK

### > Seq 226: BB7.2-Nivolumab (HLA-A2-PD-1)IgG4-SPLE C-Terminal scFv Bivalent Bispecific PD-1-sAg scFv Orientation 1

[0883] > Light Chain:

EIVLTQSPATLSLSPGERATLSCRASQSVSSYLAWYQQKPGQAPRLLIYD
ASNRATGIPARFSGS GSGTDFTLTISSLEPEDFAVYYCQQSSNWPRTFG
QGTKVEIKRTVAAPSVFIFPPSDEQLKSGTA SVVCLLNNFYPREAKVQW
KVDNALQSGNSQESVTEQDSKDSTYSLSSTLTLSKADYEKHKVYACE VT
HQGLSSPVTKSFNRGEC

### > Seq 227: BB7.2-Nivolumab IgG4-SPLE C-Terminal scFv Bivalent Bispecific PD1-sAg scFv Orientation 2

[0884] > Heavy Chain:

QVQLVESGGGVVQPGRSLRLDCKASGITFSNSGMHWVRQAPGKGLEWVAV
IWYDGSKRYYADSVK GRFTISRDNSKNTLFLQMNSLRAEDTAVYYCATN
DDYWGQGTLVTVSSASTKGPSVFPLAPCSRS TSESTAALGCLVKDYFPE
PVTVSWNSGALTSGVHTFPAVLQSSGLYSLSSVVTVPSSSLGTKTYT CN
VDHKPSNTKVDKRVESKYGPPCPSCPAPEFLGGPSVFLFPPKPKDTLMIS
RTPEVTCVVVDVS QEDPEVQFNWYVDGVEVHNAKTKPREEQFNSTYRVV
SVLTVLHQDWLNGKEYKCKVSNKGLPSSI EKTISKAKGQPREPQVYTLP
PSQEEMTKNQVSLTCLVKGFYPSDIAVEWESNGQPENNYKTTPPV LDSD
GSFFLYSRLTVDKSRWQEGNVFSCSVMHEALHNHYTQKSLSLSLGKGGGG
AGGGGDVLMTQ TPLSLPVSLGDQVSISCRSSQSIVHSNGNTYLEWYLQK
PGQSPKLLIYKVSNRFSGVPDRFSGSG SGTDFTLKISRVEAEDLGVYYC
FQGSHVPRTFGGGTKLEIKGGGGSGGGGSGGGGSQVQLQQSGP ELVKPG
ASVKMSCKASGYTFTSYHIQWVKQRPGQGLEWIGWIYPGDGSTQYNEKFK
GKTTLTADK SSSTAYMLLSSLTSEDSAIYFCAREGTYYAMDYWGQGTSV
TVSS

### > Seq 228: BB7.2-Nivolumab (HLA-A2-PD-1)IgG4-SPLE C-Terminal scFv Bivalent Bispecific PD1-sAg scFv Orientation 2

[0885] > Light Chain:

EIVLTQSPATLSLSPGERATLSCRASQSVSSYLAWYQQKPGQAPRLLIYD
ASNRATGIPARFSGS GSGTDFTLTISSLEPEDFAVYYCQQSSNWPRTFG
QGTKVEIKRTVAAPSVFIFPPSDEQLKSGTA SVVCLLNNFYPREAKVQW
KVDNALQSGNSQESVTEQDSKDSTYSLSSTLTLSKADYEKHKVYACE VT
HQGLSSPVTKSFNRGEC

### > Seq 229: BB7.2-Nivolumab IgG1-KIH-LALA C-Terminal scFv PD1 Monovalent, sAg Bivalent Bispecific 1

[0886] > Heavy Chain 1:

QVQLQQSGPELVKPGASVKMSCKASGYTFTSYHIQWVKQRPGQGLEWIGW
IYPGDGSTQYNEKFK GKTTLTADKSSSTAYMLLSSLTSEDSAIYFCARE
GTYYAMDYWGQGTSVTVSSASTKGPSVFPLA PSSKSTSGGTAALGCLVK
DYFPEPVTVSWNSGALTSGVHTFPAVLQSSGLYSLSSVVTVPSSSLG TQ
TYICNVNHKPSNTKVDKKVEPKSCDKTHTCPPCPAPEAAGGPSVFLFPPK
PKDTLMISRTPEV TCVVVDVSHEDPEVKFNWYVDGVEVHNAKTKPREEQ
YNSTYRVVSVLTVLHQDWLNGKEYKCKVS NKALPAPIEKTISKAKGQPR
EPQVYTLPPSRDELTKNQVSLWCLVKGFYPSDIAVEWESNGQPEN NYKT
TPPVLDSDGSFFLYSKLTVDKSRWQQGNVFSCSVMHEALHNHYTQKSLSL
SPGKGGGGAGG GGQVQLVESGGGVVQPGRSLRLDCKASGITFSNSGMHW
VRQAPGKGLEWVAVIWYDGSKRYYADS VKGRFTISRDNSKNTLFLQMNS
LRAEDTAVYYCATNDDYWGQGTLVTVSSGGGGSGGGGSGGGGS EIVLTQ
SPATLSLSPGERATLSCRASQSVSSYLAWYQQKPGQAPRLLIYDASNRAT
GIPARFSGS GSGTDFTLTISSLEPEDFAVYYCQQSSNWPRTFGQGTKVE
IK

### > Seq 230: BB7.2-Nivolumab IgG1-KIH-LALA C-Terminal scFv PD1 Monovalent, sAg Bivalent Bispecific 1

[0887] > Heavy Chain 2:

QVQLQQSGPELVKPGASVKMSCKASGYTFTSYHIQWVKQRPGQGLEWIGW
IYPGDGSTQYNEKFK GKTTLTADKSSSTAYMLLSSLTSEDSAIYFCARE
GTYYAMDYWGQGTSVTVSSASTKGPSVFPLA PSSKSTSGGTAALGCLVK
DYFPEPVTVSWNSGALTSGVHTFPAVLQSSGLYSLSSVVTVPSSSLG TQ
TYICNVNHKPSNTKVDKKVEPKSCDKTHTCPPCPAPEAAGGPSVFLFPPK
PKDTLMISRTPEV TCVVVDVSHEDPEVKFNWYVDGVEVHNAKTKPREEQ
YNSTYRVVSVLTVLHQDWLNGKEYKCKVS NKALPAPIEKTISKAKGQPR
EPQVYTLPPSRDELTKNQVSLWCLVKGFYPSDIAVEWESNGQPEN NYKT
TPPVLDSDGSFFLYSKLTVDKSRWQQGNVFSCSVMHEALHNHYTQKSLSL
SPGK

### > Seq 231: BB7.2-Nivolumab (HLA-A2-PD-1)IgG1-KIH-LALA C-Terminal scFv PD1 Monovalent, sAg Bivalent Bispecific 1

[0888] > Light Chain:

DVLMTQTPLSLPVSLGDQVSISCRSSQSIVHSNGNTYLEWYLQKPGQSPK
LLIYKVSNRFSGVPD RFSGSGSGTDFTLKISRVEAEDLGVYYCFQGSHV
PRTFGGGTKLEIKRTVAAPSVFIFPPSDEQL KSGTASVVCLLNNFYPRE
AKVQWKVDNALQSGNSQESVTEQDSKDSTYSLSSTLTLSKADYEKHK VY
ACEVTHQGLSSPVTKSFNRGEC

### > Seq 232: BB7.2-Nivolumab IgG1-KIH-LALA C-Terminal scFv PD1 Monovalent, sAg Bivalent Bispecific 2

[0889] > Heavy Chain 1:

QVQLQQSGPELVKPGASVKMSCKASGYTFTSYHIQWVKQRPGQGLEWIGW
IYPGDGSTQYNEKFK GKTTLTADKSSSTAYMLLSSLTSEDSAIYFCARE
GTYYAMDYWGQGTSVTVSSASTKGPSVFPLA PSSKSTSGGTAALGCLVK
DYFPEPVTVSWNSGALTSGVHTFPAVLQSSGLYSLSSVVTVPSSSLG TQ
TYICNVNHKPSNTKVDKKVEPKSCDKTHTCPPCPAPEAAGGPSVFLFPPK
PKDTLMISRTPEV TCVVVDVSHEDPEVKFNWYVDGVEVHNAKTKPREEQ
YNSTYRVVSVLTVLHQDWLNGKEYKCKVS NKALPAPIEKTISKAKGQPR
EPQVYTLPPSRDELTKNQVSLWCLVKGFYPSDIAVEWESNGQPEN NYKT
TPPVLDSDGSFFLYSKLTVDKSRWQQGNVFSCSVMHEALHNHYTQKSLSL
SPGKGGGGAGG GGEIVLTQSPATLSLSPGERATLSCRASQSVSSYLAWY
QQKPGQAPRLLIYDASNRATGIPARFS GSGSGTDFTLTISSLEPEDFAV
YYCQQSSNWPRTFGQGTKVEIKGGGGSGGGGSGGGGSQVQLVE SGGGVV
QPGRSLRLDCKASGITFSNSGMHWVRQAPGKGLEWVAVIWYDGSKRYYAD
SVKGRFTIS RDNSKNTLFLQMNSLRAEDTAVYYCATNDDYWGQGTLVTV
SS

### > Seq 232: BB7.2-Nivolumab IgG1-KIH-LALA C-Terminal scFv PD1 Monovalent, sAg Bivalent Bispecific 2

[0890] > Heavy Chain 2:

QVQLQQSGPELVKPGASVKMSCKASGYTFTSYHIQWVKQRPGQGLEWIGW
IYPGDGSTQYNEKFK GKTTLTADKSSSTAYMLLSSLTSEDSAIYFCARE
GTYYAMDYWGQGTSVTVSSASTKGPSVFPLA PSSKSTSGGTAALGCLVK
DYFPEPVTVSWNSGALTSGVHTFPAVLQSSGLYSLSSVVTVPSSSLG TQ
TYICNVNHKPSNTKVDKKVEPKSCDKTHTCPPCPAPEAAGGPSVFLFPPK
PKDTLMISRTPEV TCVVVDVSHEDPEVKFNWYVDGVEVHNAKTKPREEQ
YNSTYRVVSVLTVLHQDWLNGKEYKCKVS NKALPAPIEKTISKAKGQPR
EPQVYTLPPSRDELTKNQVSLWCLVKGFYPSDIAVEWESNGQPEN NYKT
TPPVLDSDGSFFLYSKLTVDKSRWQQGNVFSCSVMHEALHNHYTQKSLSL
SPGK

### > Seq 233: BB7.2-Nivolumab (HLA-A2-PD-1)IgG1-KIH-LALA C-Terminal scFv PD1 Monovalent, sAg Bivalent Bispecific 2

[0891] > Light Chain:

DVLMTQTPLSLPVSLGDQVSISCRSSQSIVHSNGNTYLEWYLQKPGQSPK
LLIYKVSNRFSGVPD RFSGSGSGTDFTLKISRVEAEDLGVYYCFQGSHV
PRTFGGGTKLEIKRTVAAPSVFIFPPSDEQL KSGTASVVCLLNNFYPRE
AKVQWKVDNALQSGNSQESVTEQDSKDSTYSLSSTLTLSKADYEKHK VY
ACEVTHQGLSSPVTKSFNRGEC

### > Seq 234: BB7.2-Nivolumab IgG1-KIH-LALA C-Terminal scFv PD1 Monovalent, sAg Bivalent Bispecific 3

[0892] > Heavy Chain 1:

QVQLQQSGPELVKPGASVKMSCKASGYTFTSYHIQWVKQRPGQGLEWIGW
IYPGDGSTQYNEKFK GKTTLTADKSSSTAYMLLSSLTSEDSAIYFCARE
GTYYAMDYWGQGTSVTVSSASTKGPSVFPLA PSSKSTSGGTAALGCLVK
DYFPEPVTVSWNSGALTSGVHTFPAVLQSSGLYSLSSVVTVPSSSLG TQ
TYICNVNHKPSNTKVDKKVEPKSCDKTHTCPPCPAPEAAGGPSVFLFPPK
PKDTLMISRTPEV TCVVVDVSHEDPEVKFNWYVDGVEVHNAKTKPREEQ
YNSTYRVVSVLTVLHQDWLNGKEYKCKVS NKALPAPIEKTISKAKGQPR
EPQVYTLPPSRDELTKNQVSLWCLVKGFYPSDIAVEWESNGQPEN NYKT
TPPVLDSDGSFFLYSKLTVDKSRWQQGNVFSCSVMHEALHNHYTQKSLSL
SPGKGGGGAGG GGQVQLVESGGGVVQPGRSLRLDCKASGITFSNSGMHW
VRQAPGKGLEWVAVIWYDGSKRYYADS VKGRFTISRDNSKNTLFLQMNS
LRAEDTAVYYCATNDDYWGQGTLVTVSSGGGGSGGGGSGGGGS EIVLTQ
SPATLSLSPGERATLSCRASQSVSSYLAWYQQKPGQAPRLLIYDASNRAT
GIPARFSGS GSGTDFTLTISSLEPEDFAVYYCQQSSNWPRTFGQGTKVE
IK

### > Seq 235: BB7.2-Nivolumab IgG1-KIH-LALA C-Terminal scFv PD1 Monovalent, sAg Bivalent Bispecific 3

[0893] > Heavy Chain 2:

QVQLQQSGPELVKPGASVKMSCKASGYTFTSYHIQWVKQRPGQGLEWIGW
IYPGDGSTQYNEKFK GKTTLTADKSSSTAYMLLSSLTSEDSAIYFCARE
GTYYAMDYWGQGTSVTVSSASTKGPSVFPLA PSSKSTSGGTAALGCLVK
DYFPEPVTVSWNSGALTSGVHTFPAVLQSSGLYSLSSVVTVPSSSLG TQ
TYICNVNHKPSNTKVDKKVEPKSCDKTHTCPPCPAPEAAGGPSVFLFPPK
PKDTLMISRTPEV TCVVVDVSHEDPEVKFNWYVDGVEVHNAKTKPREEQ
YNSTYRVVSVLTVLHQDWLNGKEYKCKVS NKALPAPIEKTISKAKGQPR
EPQVYTLPPSRDELTKNQVSLWCLVKGFYPSDIAVEWESNGQPEN NYKT
TPPVLDSDGSFFLYSKLTVDKSRWQQGNVFSCSVMHEALHNHYTQKSLSL
SPGK

### > Seq 236: BB7.2-Nivolumab (HLA-A2-PD-1)IgG1-KIH-LALA C-Terminal scFv PD1 Monovalent, sAg Bivalent Bispecific 3

[0894] > Light Chain:

DVLMTQTPLSLPVSLGDQVSISCRSSQSIVHSNGNTYLEWYLQKPGQSPK
LLIYKVSNRFSGVPD RFSGSGSGTDFTLKISRVEAEDLGVYYCFQGSHV
PRTFGGGTKLEIKRTVAAPSVFIFPPSDEQL KSGTASVVCLLNNFYPRE
AKVQWKVDNALQSGNSQESVTEQDSKDSTYSLSSTLTLSKADYEKHK VY
ACEVTHQGLSSPVTKSFNRGEC

### > Seq 237: BB7.2-Nivolumab IgG1-KIH-LALA C-Terminal scFv PD1 Monovalent, sAg Bivalent Bispecific 4

[0895] > Heavy Chain 1:

QVQLQQSGPELVKPGASVKMSCKASGYTFTSYHIQWVKQRPGQGLEWIGW
IYPGDGSTQYNEKFK GKTTLTADKSSSTAYMLLSSLTSEDSAIYFCARE
GTYYAMDYWGQGTSVTVSSASTKGPSVFPLA PSSKSTSGGTAALGCLVK
DYFPEPVTVSWNSGALTSGVHTFPAVLQSSGLYSLSSVVTVPSSSLG TQ
TYICNVNHKPSNTKVDKKVEPKSCDKTHTCPPCPAPEAAGGPSVFLFPPK
PKDTLMISRTPEV TCVVVDVSHEDPEVKFNWYVDGVEVHNAKTKPREEQ
YNSTYRVVSVLTVLHQDWLNGKEYKCKVS NKALPAPIEKTISKAKGQPR
EPQVYTLPPSRDELTKNQVSLWCLVKGFYPSDIAVEWESNGQPEN NYKT
TPPVLDSDGSFFLYSKLTVDKSRWQQGNVFSCSVMHEALHNHYTQKSLSL
SPGKGGGGAGG GGEIVLTQSPATLSLSPGERATLSCRASQSVSSYLAWY
QQKPGQAPRLLIYDASNRATGIPARFS GSGSGTDFTLTISSLEPEDFAV
YYCQQSSNWPRTFGQGTKVEIKGGGGSGGGGSGGGGSQVQLVE SGGGVV
QPGRSLRLDCKASGITFSNSGMHWVRQAPGKGLEWVAVIWYDGSKRYYAD
SVKGRFTIS RDNSKNTLFLQMNSLRAEDTAVYYCATNDDYWGQGTLVTV
SS

### > Seq 238: BB7.2-Nivolumab (HLA-A2-PD-1)IgG1-KIH-LALA C-Terminal scFv PD1 Monovalent, sAg Bivalent Bispecific 4

[0896] > Heavy Chain 2:

QVQLQQSGPELVKPGASVKMSCKASGYTFTSYHIQWVKQRPGQGLEWIGW
IYPGDGSTQYNEKFK GKTTLTADKSSSTAYMLLSSLTSEDSAIYFCARE
GTYYAMDYWGQGTSVTVSSASTKGPSVFPLA PSSKSTSGGTAALGCLVK
DYFPEPVTVSWNSGALTSGVHTFPAVLQSSGLYSLSSVVTVPSSSLG TQ
TYICNVNHKPSNTKVDKKVEPKSCDKTHTCPPCPAPEAAGGPSVFLFPPK
PKDTLMISRTPEV TCVVVDVSHEDPEVKFNWYVDGVEVHNAKTKPREEQ
YNSTYRVVSVLTVLHQDWLNGKEYKCKVS NKALPAPIEKTISKAKGQPR
EPQVYTLPPSRDELTKNQVSLWCLVKGFYPSDIAVEWESNGQPEN NYKT
TPPVLDSDGSFFLYSKLTVDKSRWQQGNVFSCSVMHEALHNHYTQKSLSL
SPGK

### > Seq 239: BB7.2-Nivolumab (HLA-A2-PD-1)IgG1-KIH-LALA C-Terminal scFv PD1 Monovalent, sAg Bivalent Bispecific 4

[0897] > Light Chain:

DVLMTQTPLSLPVSLGDQVSISCRSSQSIVHSNGNTYLEWYLQKPGQSPK
LLIYKVSNRFSGVPD RFSGSGSGTDFTLKISRVEAEDLGVYYCFQGSHV
PRTFGGGTKLEIKRTVAAPSVFIFPPSDEQL KSGTASVVCLLNNFYPRE
AKVQWKVDNALQSGNSQESVTEQDSKDSTYSLSSTLTLSKADYEKHK VY
ACEVTHQGLSSPVTKSFNRGEC

### > Seq 240: BB7.2-Nivolumab IgG1-KIH-LALA Monovalent Bispecific 1

[0898] > Heavy Chain 1:

QVQLQQSGPELVKPGASVKMSCKASGYTFTSYHIQWVKQRPGQGLEWIGW
IYPGDGSTQYNEKFK GKTTLTADKSSSTAYMLLSSLTSEDSAIYFCARE
GTYYAMDYWGQGTSVTVSSASTKGPSVFPLA PSSKSTSGGTAALGCLVK
DYFPEPVTVSWNSGALTSGVHTFPAVLQSSGLYSLSSVVTVPSSSLG TQ
TYICNVNHKPSNTKVDKKVEPKSCDKTHTCPPCPAPEAAGGPSVFLFPPK
PKDTLMISRTPEV TCVVVDVSHEDPEVKFNWYVDGVEVHNAKTKPREEQ
YNSTYRVVSVLTVLHQDWLNGKEYKCKVS NKALPAPIEKTISKAKGQPR
EPQVYTLPPSRDELTKNQVSLWCLVKGFYPSDIAVEWESNGQPEN NYKT
TPPVLDSDGSFFLYSKLTVDKSRWQQGNVFSCSVMHEALHNHYTQKSLSL
SPGK

### > Seq 241: BB7.2-Nivolumab (HLA-A2-PD-1)IgG1-KIH-LALA Monovalent Bispecific 1

[0899] > Heavy Chain 2:

QVQLVESGGGVVQPGRSLRLDCKASGITFSNSGMHWVRQAPGKGLEWVAV
IWYDGSKRYYADSVK GRFTISRDNSKNTLFLQMNSLRAEDTAVYYCATN
DDYWGQGTLVTVSSASTKGPSVFPLAPSSKS TSGGTAALGCLVKDYFPE
PVTVSWNSGALTSGVHTFPAVLQSSGLYSLSSVVTVPSSSLGTQTYI CN
VNHKPSNTKVDKKVEPKSCDKTHTCPPCPAPEAAGGPSVFLFPPKPKDTL
MISRTPEVTCVVV DVSHEDPEVKFNWYVDGVEVHNAKTKPREEQYNSTY
RVVSVLTVLHQDWLNGKEYKCKVSNKALP APIEKTISKAKGQPREPQVY
TLPPSRDELTKNQVSLWCLVKGFYPSDIAVEWESNGQPENNYKTT PPVL
DSDGSFFLYSKLTVDKSRWQQGNVFSCSVMHEALHNHYTQKSLSLSPGK

### > Seq 242: BB7.2-Nivolumab (HLA-A2-PD-1)IgG1-KIH-LALA Monovalent Bispecific 1

[0900] > Light Chain 1:

DVLMTQTPLSLPVSLGDQVSISCRSSQSIVHSNGNTYLEWYLQKPGQSPK
LLIYKVSNRFSGVPD RFSGSGSGTDFTLKISRVEAEDLGVYYCFQGSHV
PRTFGGGTKLEIKRTVAAPSVFIFPPSDEQL KSGTASVVCLLNNFYPRE
AKVQWKVDNALQSGNSQESVTEQDSKDSTYSLSSTLTLSKADYEKHK VY
ACEVTHQGLSSPVTKSFNRGEC

### > Seq 243: BB7.2-Nivolumab (HLA-A2-PD-1)IgG1-KIH-LALA Monovalent Bispecific 1

[0901] > Light Chain 2:

EIVLTQSPATLSLSPGERATLSCRASQSVSSYLAWYQQKPGQAPRLLIYD
ASNRATGIPARFSGS GSGTDFTLTISSLEPEDFAVYYCQQSSNWPRTFG
QGTKVEIKRTVAAPSVFIFPPSDEQLKSGTA SVVCLLNNFYPREAKVQW
KVDNALQSGNSQESVTEQDSKDSTYSLSSTLTLSKADYEKHKVYACE VT
HQGLSSPVTKSFNRGEC

### > Seq 244: BB7.2-Nivolumab IgG1-KIH-LALA Monovalent Bispecific 2

[0902] > Heavy Chain 1:

QVQLQQSGPELVKPGASVKMSCKASGYTFTSYHIQWVKQRPGQGLEWIGW
IYPGDGSTQYNEKFK GKTTLTADKSSSTAYMLLSSLTSEDSAIYFCARE
GTYYAMDYWGQGTSVTVSSASTKGPSVFPLA PSSKSTSGGTAALGCLVK
DYFPEPVTVSWNSGALTSGVHTFPAVLQSSGLYSLSSVVTVPSSSLG TQ
TYICNVNHKPSNTKVDKKVEPKSCDKTHTCPPCPAPEAAGGPSVFLFPPK
PKDTLMISRTPEV TCVVVDVSHEDPEVKFNWYVDGVEVHNAKTKPREEQ
YNSTYRVVSVLTVLHQDWLNGKEYKCKVS NKALPAPIEKTISKAKGQPR
EPQVYTLPPSRDELTKNQVSLWCLVKGFYPSDIAVEWESNGQPEN NYKT
TPPVLDSDGSFFLYSKLTVDKSRWQQGNVFSCSVMHEALHNHYTQKSLSL
SPGK

### > Seq 245: BB7.2-Nivolumab (HLA-A2-PD-1)IgG1-KIH-LALA Monovalent Bispecific 2

[0903] > Heavy Chain 2:

QVQLVESGGGVVQPGRSLRLDCKASGITFSNSGMHWVRQAPGKGLEWVAV
IWYDGSKRYYADSVK GRFTISRDNSKNTLFLQMNSLRAEDTAVYYCATN
DDYWGQGTLVTVSSASTKGPSVFPLAPSSKS TSGGTAALGCLVKDYFPE
PVTVSWNSGALTSGVHTFPAVLQSSGLYSLSSVVTVPSSSLGTQTYI CN
VNHKPSNTKVDKKVEPKSCDKTHTCPPCPAPEAAGGPSVFLFPPKPKDTL
MISRTPEVTCVVV DVSHEDPEVKFNWYVDGVEVHNAKTKPREEQYNSTY
RVVSVLTVLHQDWLNGKEYKCKVSNKALP APIEKTISKAKGQPREPQVY
TLPPSRDELTKNQVSLWCLVKGFYPSDIAVEWESNGQPENNYKTT PPVL
DSDGSFFLYSKLTVDKSRWQQGNVFSCSVMHEALHNHYTQKSLSLSPGK

### > Seq 246: BB7.2-Nivolumab (HLA-A2-PD-1)IgG1-KIH-LALA Monovalent Bispecific 2

[0904] > Light Chain 1:

DVLMTQTPLSLPVSLGDQVSISCRSSQSIVHSNGNTYLEWYLQKPGQSPK
LLIYKVSNRFSGVPD RFSGSGSGTDFTLKISRVEAEDLGVYYCFQGSHV
PRTFGGGTKLEIKRTVAAPSVFIFPPSDEQL KSGTASVVCLLNNFYPRE
AKVQWKVDNALQSGNSQESVTEQDSKDSTYSLSSTLTLSKADYEKHK VY
ACEVTHQGLSSPVTKSFNRGEC

### > Seq 247: BB7.2-Nivolumab (HLA-A2-PD-1)IgG1-KIH-LALA Monovalent Bispecific 2

[0905] > Light Chain 2:

EIVLTQSPATLSLSPGERATLSCRASQSVSSYLAWYQQKPGQAPRLLIYD
ASNRATGIPARFSGS GSGTDFTLTISSLEPEDFAVYYCQQSSNWPRTFG
QGTKVEIKRTVAAPSVFIFPPSDEQLKSGTA SVVCLLNNFYPREAKVQW
KVDNALQSGNSQESVTEQDSKDSTYSLSSTLTLSKADYEKHKVYACE VT
HQGLSSPVTKSFNRGEC

### > Seq 248: 9.49-Pembrolizumab (MHC II (Pan-Allele)-PD-1)IgG4-SPLE C-Terminal scFv Bivalent Bispecific sAg-PD-1 scFv Orientation 1

[0906] > Heavy Chain:

EVQLQESGPSLVRPSQTLSLTCSVTGDSITSSYWNWIRKFPGNKLEYMGY
ITYSGNTYYTPSLKS RISITRDTSKNQYFLQLNSVTTEDTATYYCSRDY
GRGDYAMVYWGQGTSVTVSSASTKGPSVFPL APCSRSTSESTAALGCLV
KDYFPEPVTVSWNSGALTSGVHTFPAVLQSSGLYSLSSVVTVPSSSL GT
KTYTCNVDHKPSNTKVDKRVESKYGPPCPSCPAPEFLGGPSVFLFPPKPK
DTLMISRTPEVTC VVVDVSQEDPEVQFNWYVDGVEVHNAKTKPREEQFN
STYRVVSVLTVLHQDWLNGKEYKCKVSNK GLPSSIEKTISKAKGQPREP
QVYTLPPSQEEMTKNQVSLTCLVKGFYPSDIAVEWESNGQPENNY KTTP
PVLDSDGSFFLYSRLTVDKSRWQEGNVFSCSVMHEALHNHYTQKSLSLSL
GKGGGGAGGGG QVQLVQSGVEVKKPGASVKVSCKASGYTFTNYYMYWVR
QAPGQGLEWMGGINPSNGGTNFNEKFK NRVTLTTDSSTTTAYMELKSLQ
FDDTAVYYCARRDYRFDMGFDYWGQGTTVTVSSGGGGSGGGGS GGGGSE
IVLTQSPATLSLSPGERATLSCRASKGVSTSGYSYLHWYQQKPGQAPRLL
IYLASYLES GVPARFSGSGSGTDFTLTISSLEPEDFAVYYCQHSRDLPL
TFGGGTKVEIK

### > Seq 249: 9.49-Pembrolizumab (MHC II (Pan-Allele)-PD-1)IgG4-SPLE C-Terminal scFv Bivalent Bispecific sAg-PD-1 scFv Orientation 1

[0907] > Light Chain:

DVVLTQSPATLSVTPGDSVSLSCRASQSIINNLHWYHQKSHESPRLLIKY
ASQSISGIPSRFSGS GSGTDFTLSINSVETEDFGVYFCQQSGSWPYTFG
GGSNLEIKRTVAAPSVFIFPPSDEQLKSGTA SVVCLLNNFYPREAKVQW
KVDNALQSGNSQESVTEQDSKDSTYSLSSTLTLSKADYEKHKVYACE VT
HQGLSSPVTKSFNRGEC

### > Seq 250: 9.49-Pembrolizumab IgG4-SPLE C-Terminal scFv Bivalent Bispecific sAg-PD-1 scFv Orientation 2

[0908] > Heavy Chain:

EVQLQESGPSLVRPSQTLSLTCSVTGDSITSSYWNWIRKFPGNKLEYMGY
ITYSGNTYYTPSLKS RISITRDTSKNQYFLQLNSVTTEDTATYYCSRDY
GRGDYAMVYWGQGTSVTVSSASTKGPSVFPL APCSRSTSESTAALGCLV
KDYFPEPVTVSWNSGALTSGVHTFPAVLQSSGLYSLSSVVTVPSSSL GT
KTYTCNVDHKPSNTKVDKRVESKYGPPCPSCPAPEFLGGPSVFLFPPKPK
DTLMISRTPEVTC VVVDVSQEDPEVQFNWYVDGVEVHNAKTKPREEQFN
STYRVVSVLTVLHQDWLNGKEYKCKVSNK GLPSSIEKTISKAKGQPREP
QVYTLPPSQEEMTKNQVSLTCLVKGFYPSDIAVEWESNGQPENNY KTTP
PVLDSDGSFFLYSRLTVDKSRWQEGNVFSCSVMHEALHNHYTQKSLSLSL
GKGGGGAGGGG EIVLTQSPATLSLSPGERATLSCRASKGVSTSGYSYLH
WYQQKPGQAPRLLIYLASYLESGVPAR FSGSGSGTDFTLTISSLEPEDF
AVYYCQHSRDLPLTFGGGTKVEIKGGGGSGGGGSGGGGSQVQL VQSGVE
VKKPGASVKVSCKASGYTFTNYYMYWVRQAPGQGLEWMGGINPSNGGTNF
NEKFKNRVT LTTDSSTTTAYMELKSLQFDDTAVYYCARRDYRFDMGFDY
WGQGTTVTVSS

### > Seq 251: 9.49-Pembrolizumab (MHC II (Pan-Allele)-PD-1)IgG4-SPLE C-Terminal scFv Bivalent Bispecific sAg-PD-1 scFv Orientation 2

[0909] > Light Chain:

DVVLTQSPATLSVTPGDSVSLSCRASQSIINNLHWYHQKSHESPRLLIKY
ASQSISGIPSRFSGS GSGTDFTLSINSVETEDFGVYFCQQSGSWPYTFG
GGSNLEIKRTVAAPSVFIFPPSDEQLKSGTA SVVCLLNNFYPREAKVQW
KVDNALQSGNSQESVTEQDSKDSTYSLSSTLTLSKADYEKHKVYACE VT
HQGLSSPVTKSFNRGEC

### > Seq 252: 9.49-Pembrolizumab IgG4-SPLE C-Terminal scFv Bivalent Bispecific PD-1-sAg scFv Orientation 1

[0910] > Heavy Chain:

QVQLVQSGVEVKKPGASVKVSCKASGYTFTNYYMYWVRQAPGQGLEWMGG
INPSNGGTNFNEKFK NRVTLTTDSSTTTAYMELKSLQFDDTAVYYCARR
DYRFDMGFDYWGQGTTVTVSSASTKGPSVFP LAPCSRSTSESTAALGCL
VKDYFPEPVTVSWNSGALTSGVHTFPAVLQSSGLYSLSSVVTVPSSS LG
TKTYTCNVDHKPSNTKVDKRVESKYGPPCPSCPAPEFLGGPSVFLFPPKP
KDTLMISRTPEVT CVVVDVSQEDPEVQFNWYVDGVEVHNAKTKPREEQF
NSTYRVVSVLTVLHQDWLNGKEYKCKVSN KGLPSSIEKTISKAKGQPRE
PQVYTLPPSQEEMTKNQVSLTCLVKGFYPSDIAVEWESNGQPENN YKTT
PPVLDSDGSFFLYSRLTVDKSRWQEGNVFSCSVMHEALHNHYTQKSLSLS
LGKGGGGAGGG GEVQLQESGPSLVRPSQTLSLTCSVTGDSITSSYWNWI
RKFPGNKLEYMGYITYSGNTYYTPSLK SRISITRDTSKNQYFLQLNSVT
TEDTATYYCSRDYGRGDYAMVYWGQGTSVTVSSGGGGSGGGGS GGGGSD
VVLTQSPATLSVTPGDSVSLSCRASQSIINNLHWYHQKSHESPRLLIKYA
SQSISGIPS RFSGSGSGTDFTLSINSVETEDFGVYFCQQSGSWPYTFGG
GSNLEIK

### > Seq 253: 9.49-Pembrolizumab (MHC II (Pan-Allele)-PD-1)IgG4-SPLE C-Terminal scFv Bivalent Bispecific PD-1-sAg scFv Orientation 1

[0911] > Light Chain:

EIVLTQSPATLSLSPGERATLSCRASKGVSTSGYSYLHWYQQKPGQAPRL
LIYLASYLESGVPAR FSGSGSGTDFTLTISSLEPEDFAVYYCQHSRDLP
LTFGGGTKVEIKRTVAAPSVFIFPPSDEQLK SGTASVVCLLNNFYPREA
KVQWKVDNALQSGNSQESVTEQDSKDSTYSLSSTLTLSKADYEKHKV YA
CEVTHQGLSSPVTKSFNRGEC

### > Seq 254: 9.49-Pembrolizumab IgG4-SPLE C-Terminal scFv Bivalent Bispecific PD1-sAg scFv Orientation 2

[0912] > Heavy Chain:

QVQLVQSGVEVKKPGASVKVSCKASGYTFTNYYMYWVRQAPGQGLEWMGG
INPSNGGTNFNEKFK NRVTLTTDSSTTTAYMELKSLQFDDTAVYYCARR
DYRFDMGFDYWGQGTTVTVSSASTKGPSVFP LAPCSRSTSESTAALGCL
VKDYFPEPVTVSWNSGALTSGVHTFPAVLQSSGLYSLSSVVTVPSSS LG
TKTYTCNVDHKPSNTKVDKRVESKYGPPCPSCPAPEFLGGPSVFLFPPKP
KDTLMISRTPEVT CVVVDVSQEDPEVQFNWYVDGVEVHNAKTKPREEQF
NSTYRVVSVLTVLHQDWLNGKEYKCKVSN KGLPSSIEKTISKAKGQPRE
PQVYTLPPSQEEMTKNQVSLTCLVKGFYPSDIAVEWESNGQPENN YKTT
PPVLDSDGSFFLYSRLTVDKSRWQEGNVFSCSVMHEALHNHYTQKSLSLS
LGKGGGGAGGG GDVVLTQSPATLSVTPGDSVSLSCRASQSIINNLHWYH
QKSHESPRLLIKYASQSISGIPSRFSG SGSGTDFTLSINSVETEDFGVY
FCQQSGSWPYTFGGGSNLEIKGGGGSGGGGSGGGGSEVQLQES GPSLVR
PSQTLSLTCSVTGDSITSSYWNWIRKFPGNKLEYMGYITYSGNTYYTPSL
KSRISITRD TSKNQYFLQLNSVTTEDTATYYCSRDYGRGDYAMVYWGQG
TSVTVSS

### > Seq 255: 9.49-Pembrolizumab (MHC II (Pan-Allele)-PD-1)IgG4-SPLE C-Terminal scFv Bivalent Bispecific PD1-sAg scFv Orientation 2

[0913] > Light Chain:

EIVLTQSPATLSLSPGERATLSCRASKGVSTSGYSYLHWYQQKPGQAPRL
LIYLASYLESGVPAR FSGSGSGTDFTLTISSLEPEDFAVYYCQHSRDLP
LTFGGGTKVEIKRTVAAPSVFIFPPSDEQLK SGTASVVCLLNNFYPREA
KVQWKVDNALQSGNSQESVTEQDSKDSTYSLSSTLTLSKADYEKHKV YA
CEVTHQGLSSPVTKSFNRGEC

### > Seq 256: 9.49-Pembrolizumab IgG1-KIH-LALA C-Terminal scFv PD1 Monovalent, sAg Bivalent Bispecific 1

[0914] > Heavy Chain 1:

EVQLQESGPSLVRPSQTLSLTCSVTGDSITSSYWNWIRKFPGNKLEYMGY
ITYSGNTYYTPSLKS RISITRDTSKNQYFLQLNSVTTEDTATYYCSRDY
GRGDYAMVYWGQGTSVTVSSASTKGPSVFPL APSSKSTSGGTAALGCLV
KDYFPEPVTVSWNSGALTSGVHTFPAVLQSSGLYSLSSVVTVPSSSL GT
QTYICNVNHKPSNTKVDKKVEPKSCDKTHTCPPCPAPEAAGGPSVFLFPP
KPKDTLMISRTPE VTCVVVDVSHEDPEVKFNWYVDGVEVHNAKTKPREE
QYNSTYRVVSVLTVLHQDWLNGKEYKCKV SNKALPAPIEKTISKAKGQP
REPQVYTLPPSRDELTKNQVSLWCLVKGFYPSDIAVEWESNGQPE NNYK
TTPPVLDSDGSFFLYSKLTVDKSRWQQGNVFSCSVMHEALHNHYTQKSLS
LSPGKGGGGAG GGGQVQLVQSGVEVKKPGASVKVSCKASGYTFTNYYMY
WVRQAPGQGLEWMGGINPSNGGTNFNE KFKNRVTLTTDSSTTTAYMELK
SLQFDDTAVYYCARRDYRFDMGFDYWGQGTTVTVSSGGGGSGG GGSGGG
GSEIVLTQSPATLSLSPGERATLSCRASKGVSTSGYSYLHWYQQKPGQAP
RLLIYLASY LESGVPARFSGSGSGTDFTLTISSLEPEDFAVYYCQHSRD
LPLTFGGGTKVEIK

### > Seq 257: 9.49-Pembrolizumab IgG1-KIH-LALA C-Terminal scFv PD1 Monovalent, sAg Bivalent Bispecific 1

[0915] > Heavy Chain 2:

EVQLQESGPSLVRPSQTLSLTCSVTGDSITSSYWNWIRKFPGNKLEYMGY
ITYSGNTYYTPSLKS RISITRDTSKNQYFLQLNSVTTEDTATYYCSRDY
GRGDYAMVYWGQGTSVTVSSASTKGPSVFPL APSSKSTSGGTAALGCLV
KDYFPEPVTVSWNSGALTSGVHTFPAVLQSSGLYSLSSVVTVPSSSL GT
QTYICNVNHKPSNTKVDKKVEPKSCDKTHTCPPCPAPEAAGGPSVFLFPP
KPKDTLMISRTPE VTCVVVDVSHEDPEVKFNWYVDGVEVHNAKTKPREE
QYNSTYRVVSVLTVLHQDWLNGKEYKCKV SNKALPAPIEKTISKAKGQP
REPQVYTLPPSRDELTKNQVSLWCLVKGFYPSDIAVEWESNGQPE NNYK
TTPPVLDSDGSFFLYSKLTVDKSRWQQGNVFSCSVMHEALHNHYTQKSLS
LSPGK

### > Seq 258: 9.49-Pembrolizumab (MHC II (Pan-Allele)-PD-1)IgG1-KIH-LALA C-Terminal scFv PD1 Monovalent, sAg Bivalent Bispecific 1

[0916] > Light Chain:

DVVLTQSPATLSVTPGDSVSLSCRASQSIINNLHWYHQKSHESPRLLIKY
ASQSISGIPSRFSGS GSGTDFTLSINSVETEDFGVYFCQQSGSWPYTFG
GGSNLEIKRTVAAPSVFIFPPSDEQLKSGTA SVVCLLNNFYPREAKVQW
KVDNALQSGNSQESVTEQDSKDSTYSLSSTLTLSKADYEKHKVYACE VT
HQGLSSPVTKSFNRGEC

### > Seq 259: 9.49-Pembrolizumab IgG1-KIH-LALA C-Terminal scFv PD1 Monovalent, sAg Bivalent Bispecific 2

[0917] > Heavy Chain 1:

EVQLQESGPSLVRPSQTLSLTCSVTGDSITSSYWNWIRKFPGNKLEYMGY
ITYSGNTYYTPSLKS RISITRDTSKNQYFLQLNSVTTEDTATYYCSRDY
GRGDYAMVYWGQGTSVTVSSASTKGPSVFPL APSSKSTSGGTAALGCLV
KDYFPEPVTVSWNSGALTSGVHTFPAVLQSSGLYSLSSVVTVPSSSL GT
QTYICNVNHKPSNTKVDKKVEPKSCDKTHTCPPCPAPEAAGGPSVFLFPP
KPKDTLMISRTPE VTCVVVDVSHEDPEVKFNWYVDGVEVHNAKTKPREE
QYNSTYRVVSVLTVLHQDWLNGKEYKCKV SNKALPAPIEKTISKAKGQP
REPQVYTLPPSRDELTKNQVSLWCLVKGFYPSDIAVEWESNGQPE NNYK
TTPPVLDSDGSFFLYSKLTVDKSRWQQGNVFSCSVMHEALHNHYTQKSLS
LSPGKGGGGAG GGGEIVLTQSPATLSLSPGERATLSCRASKGVSTSGYS
YLHWYQQKPGQAPRLLIYLASYLESGV PARFSGSGSGTDFTLTISSLEP
EDFAVYYCQHSRDLPLTFGGGTKVEIKGGGGSGGGGSGGGGSQ VQLVQS
GVEVKKPGASVKVSCKASGYTFTNYYMYWVRQAPGQGLEWMGGINPSNGG
TNFNEKFKN RVTLTTDSSTTTAYMELKSLQFDDTAVYYCARRDYRFDMG
FDYWGQGTTVTVSS

### > Seq 259: 9.49-Pembrolizumab IgG1-KIH-LALA C-Terminal scFv PD1 Monovalent, sAg Bivalent Bispecific 2

[0918] > Heavy Chain 2:

EVQLQESGPSLVRPSQTLSLTCSVTGDSITSSYWNWIRKFPGNKLEYMGY
ITYSGNTYYTPSLKS RISITRDTSKNQYFLQLNSVTTEDTATYYCSRDY
GRGDYAMVYWGQGTSVTVSSASTKGPSVFPL APSSKSTSGGTAALGCLV
KDYFPEPVTVSWNSGALTSGVHTFPAVLQSSGLYSLSSVVTVPSSSL GT
QTYICNVNHKPSNTKVDKKVEPKSCDKTHTCPPCPAPEAAGGPSVFLFPP
KPKDTLMISRTPE VTCVVVDVSHEDPEVKFNWYVDGVEVHNAKTKPREE
QYNSTYRVVSVLTVLHQDWLNGKEYKCKV SNKALPAPIEKTISKAKGQP
REPQVYTLPPSRDELTKNQVSLWCLVKGFYPSDIAVEWESNGQPE NNYK
TTPPVLDSDGSFFLYSKLTVDKSRWQQGNVFSCSVMHEALHNHYTQKSLS
LSPGK

### > Seq 260: 9.49-Pembrolizumab (MHC II (Pan-Allele)-PD-1)IgG1-KIH-LALA C-Terminal scFv PD1 Monovalent, sAg Bivalent Bispecific 2

[0919] > Light Chain:

DVVLTQSPATLSVTPGDSVSLSCRASQSIINNLHWYHQKSHESPRLLIKY
ASQSISGIPSRFSGS GSGTDFTLSINSVETEDFGVYFCQQSGSWPYTFG
GGSNLEIKRTVAAPSVFIFPPSDEQLKSGTA SVVCLLNNFYPREAKVQW
KVDNALQSGNSQESVTEQDSKDSTYSLSSTLTLSKADYEKHKVYACE VT
HQGLSSPVTKSFNRGEC

### > Seq 261: 9.49-Pembrolizumab IgG1-KIH-LALA C-Terminal scFv PD1 Monovalent, sAg Bivalent Bispecific 3

[0920] > Heavy Chain 1:

EVQLQESGPSLVRPSQTLSLTCSVTGDSITSSYWNWIRKFPGNKLEYMGY
ITYSGNTYYTPSLKS RISITRDTSKNQYFLQLNSVTTEDTATYYCSRDY
GRGDYAMVYWGQGTSVTVSSASTKGPSVFPL APSSKSTSGGTAALGCLV
KDYFPEPVTVSWNSGALTSGVHTFPAVLQSSGLYSLSSVVTVPSSSL GT
QTYICNVNHKPSNTKVDKKVEPKSCDKTHTCPPCPAPEAAGGPSVFLFPP
KPKDTLMISRTPE VTCVVVDVSHEDPEVKFNWYVDGVEVHNAKTKPREE
QYNSTYRVVSVLTVLHQDWLNGKEYKCKV SNKALPAPIEKTISKAKGQP
REPQVYTLPPSRDELTKNQVSLWCLVKGFYPSDIAVEWESNGQPE NNYK
TTPPVLDSDGSFFLYSKLTVDKSRWQQGNVFSCSVMHEALHNHYTQKSLS
LSPGKGGGGAG GGGQVQLVQSGVEVKKPGASVKVSCKASGYTFTNYYMY
WVRQAPGQGLEWMGGINPSNGGTNFNE KFKNRVTLTTDSSTTTAYMELK
SLQFDDTAVYYCARRDYRFDMGFDYWGQGTTVTVSSGGGGSGG GGSGGG
GSEIVLTQSPATLSLSPGERATLSCRASKGVSTSGYSYLHWYQQKPGQAP
RLLIYLASY LESGVPARFSGSGSGTDFTLTISSLEPEDFAVYYCQHSRD
LPLTFGGGTKVEIK

### > Seq 262: 9.49-Pembrolizumab IgG1-KIH-LALA C-Terminal scFv PD1 Monovalent, sAg Bivalent Bispecific 3

[0921] > Heavy Chain 2:

EVQLQESGPSLVRPSQTLSLTCSVTGDSITSSYWNWIRKFPGNKLEYMGY
ITYSGNTYYTPSLKS RISITRDTSKNQYFLQLNSVTTEDTATYYCSRDY
GRGDYAMVYWGQGTSVTVSSASTKGPSVFPL APSSKSTSGGTAALGCLV
KDYFPEPVTVSWNSGALTSGVHTFPAVLQSSGLYSLSSVVTVPSSSL GT
QTYICNVNHKPSNTKVDKKVEPKSCDKTHTCPPCPAPEAAGGPSVFLFPP
KPKDTLMISRTPE VTCVVVDVSHEDPEVKFNWYVDGVEVHNAKTKPREE
QYNSTYRVVSVLTVLHQDWLNGKEYKCKV SNKALPAPIEKTISKAKGQP
REPQVYTLPPSRDELTKNQVSLWCLVKGFYPSDIAVEWESNGQPE NNYK
TTPPVLDSDGSFFLYSKLTVDKSRWQQGNVFSCSVMHEALHNHYTQKSLS
LSPGK

### > Seq 263: 9.49-Pembrolizumab (MHC II (Pan-Allele)-PD-1)IgG1-KIH-LALA C-Terminal scFv PD1 Monovalent, sAg Bivalent Bispecific 3

[0922] > Light Chain:

DVVLTQSPATLSVTPGDSVSLSCRASQSIINNLHWYHQKSHESPRLLIKY
ASQSISGIPSRFSGS GSGTDFTLSINSVETEDFGVYFCQQSGSWPYTFG
GGSNLEIKRTVAAPSVFIFPPSDEQLKSGTA SVVCLLNNFYPREAKVQW
KVDNALQSGNSQESVTEQDSKDSTYSLSSTLTLSKADYEKHKVYACE VT
HQGLSSPVTKSFNRGEC

### > Seq 264: 9.49-Pembrolizumab IgG1-KIH-LALA C-Terminal scFv PD1 Monovalent, sAg Bivalent Bispecific 4

[0923] > Heavy Chain 1:

EVQLQESGPSLVRPSQTLSLTCSVTGDSITSSYWNWIRKFPGNKLEYMGY
ITYSGNTYYTPSLKS RISITRDTSKNQYFLQLNSVTTEDTATYYCSRDY
GRGDYAMVYWGQGTSVTVSSASTKGPSVFPL APSSKSTSGGTAALGCLV
KDYFPEPVTVSWNSGALTSGVHTFPAVLQSSGLYSLSSVVTVPSSSL GT
QTYICNVNHKPSNTKVDKKVEPKSCDKTHTCPPCPAPEAAGGPSVFLFPP
KPKDTLMISRTPE VTCVVVDVSHEDPEVKFNWYVDGVEVHNAKTKPREE
QYNSTYRVVSVLTVLHQDWLNGKEYKCKV SNKALPAPIEKTISKAKGQP
REPQVYTLPPSRDELTKNQVSLWCLVKGFYPSDIAVEWESNGQPE NNYK
TTPPVLDSDGSFFLYSKLTVDKSRWQQGNVFSCSVMHEALHNHYTQKSLS
LSPGKGGGGAG GGGEIVLTQSPATLSLSPGERATLSCRASKGVSTSGYS
YLHWYQQKPGQAPRLLIYLASYLESGV PARFSGSGSGTDFTLTISSLEP
EDFAVYYCQHSRDLPLTFGGGTKVEIKGGGGSGGGGSGGGGSQ VQLVQS
GVEVKKPGASVKVSCKASGYTFTNYYMYWVRQAPGQGLEWMGGINPSNGG
TNFNEKFKN RVTLTTDSSTTTAYMELKSLQFDDTAVYYCARRDYRFDMG
FDYWGQGTTVTVSS

### > Seq 265: 9.49-Pembrolizumab (MHC II (Pan-Allele)-PD-1)IgG1-KIH-LALA C-Terminal scFv PD1 Monovalent, sAg Bivalent Bispecific 4

[0924] > Heavy Chain 2:

EVQLQESGPSLVRPSQTLSLTCSVTGDSITSSYWNWIRKFPGNKLEYMGY
ITYSGNTYYTPSLKS RISITRDTSKNQYFLQLNSVTTEDTATYYCSRDY
GRGDYAMVYWGQGTSVTVSSASTKGPSVFPL APSSKSTSGGTAALGCLV
KDYFPEPVTVSWNSGALTSGVHTFPAVLQSSGLYSLSSVVTVPSSSL GT
QTYICNVNHKPSNTKVDKKVEPKSCDKTHTCPPCPAPEAAGGPSVFLFPP
KPKDTLMISRTPE VTCVVVDVSHEDPEVKFNWYVDGVEVHNAKTKPREE
QYNSTYRVVSVLTVLHQDWLNGKEYKCKV SNKALPAPIEKTISKAKGQP
REPQVYTLPPSRDELTKNQVSLWCLVKGFYPSDIAVEWESNGQPE NNYK
TTPPVLDSDGSFFLYSKLTVDKSRWQQGNVFSCSVMHEALHNHYTQKSLS
LSPGK

### > Seq 266: 9.49-Pembrolizumab (MHC II (Pan-Allele)-PD-1)IgG1-KIH-LALA C-Terminal scFv PD1 Monovalent, sAg Bivalent Bispecific 4

[0925] > Light Chain:

DVVLTQSPATLSVTPGDSVSLSCRASQSIINNLHWYHQKSHESPRLLIKY
ASQSISGIPSRFSGS GSGTDFTLSINSVETEDFGVYFCQQSGSWPYTFG
GGSNLEIKRTVAAPSVFIFPPSDEQLKSGTA SVVCLLNNFYPREAKVQW
KVDNALQSGNSQESVTEQDSKDSTYSLSSTLTLSKADYEKHKVYACE VT
HQGLSSPVTKSFNRGEC

### > Seq 267: 9.49-Pembrolizumab IgG1-KIH-LALA Monovalent Bispecific 1

[0926] > Heavy Chain 1:

EVQLQESGPSLVRPSQTLSLTCSVTGDSITSSYWNWIRKFPGNKLEYMGY
ITYSGNTYYTPSLKS RISITRDTSKNQYFLQLNSVTTEDTATYYCSRDY
GRGDYAMVYWGQGTSVTVSSASTKGPSVFPL APSSKSTSGGTAALGCLV
KDYFPEPVTVSWNSGALTSGVHTFPAVLQSSGLYSLSSVVTVPSSSL GT
QTYICNVNHKPSNTKVDKKVEPKSCDKTHTCPPCPAPEAAGGPSVFLFPP
KPKDTLMISRTPE VTCVVVDVSHEDPEVKFNWYVDGVEVHNAKTKPREE
QYNSTYRVVSVLTVLHQDWLNGKEYKCKV SNKALPAPIEKTISKAKGQP
REPQVYTLPPSRDELTKNQVSLWCLVKGFYPSDIAVEWESNGQPE NNYK
TTPPVLDSDGSFFLYSKLTVDKSRWQQGNVFSCSVMHEALHNHYTQKSLS
LSPGK

### > Seq 268: 9.49-Pembrolizumab (MHC II (Pan-Allele)-PD-1)IgG1-KIH-LALA Monovalent Bispecific 1

[0927] > Heavy Chain 2:

QVQLVQSGVEVKKPGASVKVSCKASGYTFTNYYMYWVRQAPGQGLEWMGG
INPSNGGTNFNEKFK NRVTLTTDSSTTTAYMELKSLQFDDTAVYYCARR
DYRFDMGFDYWGQGTTVTVSSASTKGPSVFP LAPSSKSTSGGTAALGCL
VKDYFPEPVTVSWNSGALTSGVHTFPAVLQSSGLYSLSSVVTVPSSS LG
TQTYICNVNHKPSNTKVDKKVEPKSCDKTHTCPPCPAPEAAGGPSVFLFP
PKPKDTLMISRTP EVTCVVVDVSHEDPEVKFNWYVDGVEVHNAKTKPRE
EQYNSTYRVVSVLTVLHQDWLNGKEYKCK VSNKALPAPIEKTISKAKGQ
PREPQVYTLPPSRDELTKNQVSLWCLVKGFYPSDIAVEWESNGQP ENNY
KTTPPVLDSDGSFFLYSKLTVDKSRWQQGNVFSCSVMHEALHNHYTQKSL
SLSPGK

### > Seq 269: 9.49-Pembrolizumab (MHC II (Pan-Allele)-PD-1)IgG1-KIH-LALA Monovalent Bispecific 1

[0928] > Light Chain 1:

DVVLTQSPATLSVTPGDSVSLSCRASQSIINNLHWYHQKSHESPRLLIKY
ASQSISGIPSRFSGS GSGTDFTLSINSVETEDFGVYFCQQSGSWPYTFG
GGSNLEIKRTVAAPSVFIFPPSDEQLKSGTA SVVCLLNNFYPREAKVQW
KVDNALQSGNSQESVTEQDSKDSTYSLSSTLTLSKADYEKHKVYACE VT
HQGLSSPVTKSFNRGEC

### > Seq 270: 9.49-Pembrolizumab (MHC II (Pan-Allele)-PD-1)IgG1-KIH-LALA Monovalent Bispecific 1

[0929] > Light Chain 2:

EVLTQSPATLSLSPGERATLSCRASKGVSTSGYSYLHWYQQKPGQAPRLL
IYLASYLESGVPAR FSGSGSGTDFTLTISSLEPEDFAVYYCQHSRDLPL
TFGGGTKVEIKRTVAAPSVFIFPPSDEQLK SGTASVVCLLNNFYPREAK
VQWKVDNALQSGNSQESVTEQDSKDSTYSLSSTLTLSKADYEKHKV YAC
EVTHQGLSSPVTKSFNRGEC

### > Seq 271: 9.49-Pembrolizumab IgG1-KIH-LALA Monovalent Bispecific 2

[0930] > Heavy Chain 1:

EVQLQESGPSLVRPSQTLSLTCSVTGDSITSSYWNWIRKFPGNKLEYMGY
ITYSGNTYYTPSLKS RISITRDTSKNQYFLQLNSVTTEDTATYYCSRDY
GRGDYAMVYWGQGTSVTVSSASTKGPSVFPL APSSKSTSGGTAALGCLV
KDYFPEPVTVSWNSGALTSGVHTFPAVLQSSGLYSLSSVVTVPSSSL GT
QTYICNVNHKPSNTKVDKKVEPKSCDKTHTCPPCPAPEAAGGPSVFLFPP
KPKDTLMISRTPE VTCVVVDVSHEDPEVKFNWYVDGVEVHNAKTKPREE
QYNSTYRVVSVLTVLHQDWLNGKEYKCKV SNKALPAPIEKTISKAKGQP
REPQVYTLPPSRDELTKNQVSLWCLVKGFYPSDIAVEWESNGQPE NNYK
TTPPVLDSDGSFFLYSKLTVDKSRWQQGNVFSCSVMHEALHNHYTQKSLS
LSPGK

### > Seq 272: 9.49-Pembrolizumab (MHC II (Pan-Allele)-PD-1)IgG1-KIH-LALA Monovalent Bispecific 2

[0931] > Heavy Chain 2:

QVQLVQSGVEVKKPGASVKVSCKASGYTFTNYYMYWVRQAPGQGLEWMGG
INPSNGGTNFNEKFK NRVTLTTDSSTTTAYMELKSLQFDDTAVYYCARR
DYRFDMGFDYWGQGTTVTVSSASTKGPSVFP LAPSSKSTSGGTAALGCL
VKDYFPEPVTVSWNSGALTSGVHTFPAVLQSSGLYSLSSVVTVPSSS LG
TQTYICNVNHKPSNTKVDKKVEPKSCDKTHTCPPCPAPEAAGGPSVFLFP
PKPKDTLMISRTP EVTCVVVDVSHEDPEVKFNWYVDGVEVHNAKTKPRE
EQYNSTYRVVSVLTVLHQDWLNGKEYKCK VSNKALPAPIEKTISKAKGQ
PREPQVYTLPPSRDELTKNQVSLWCLVKGFYPSDIAVEWESNGQP ENNY
KTTPPVLDSDGSFFLYSKLTVDKSRWQQGNVFSCSVMHEALHNHYTQKSL
SLSPGK

### > Seq 273: 9.49-Pembrolizumab (MHC II (Pan-Allele)-PD-1)IgG1-KIH-LALA Monovalent Bispecific 2

[0932] > Light Chain 1:

DVVLTQSPATLSVTPGDSVSLSCRASQSIINNLHWYHQKSHESPRLLIKY
ASQSISGIPSRFSGS GSGTDFTLSINSVETEDFGVYFCQQSGSWPYTFG
GGSNLEIKRTVAAPSVFIFPPSDEQLKSGTA SVVCLLNNFYPREAKVQW
KVDNALQSGNSQESVTEQDSKDSTYSLSSTLTLSKADYEKHKVYACE VT
HQGLSSPVTKSFNRGEC

### > Seq 274: 9.49-Pembrolizumab (MHC II (Pan-Allele)-PD-1)IgG1-KIH-LALA Monovalent Bispecific 2

[0933] > Light Chain 2:

EIVLTQSPATLSLSPGERATLSCRASKGVSTSGYSYLHWYQQKPGQAPRL
LIYLASYLESGVPAR FSGSGSGTDFTLTISSLEPEDFAVYYCQHSRDLP
LTFGGGTKVEIKRTVAAPSVFIFPPSDEQLK SGTASVVCLLNNFYPREA
KVQWKVDNALQSGNSQESVTEQDSKDSTYSLSSTLTLSKADYEKHKV YA
CEVTHQGLSSPVTKSFNRGEC

### > Seq 275: 9.49-Nivolumab (MHC II (Pan-Allele)-PD-1)IgG4-SPLE C-Terminal scFv Bivalent Bispecific sAg-PD-1 scFv Orientation 1

[0934] > Heavy Chain:

EVQLQESGPSLVRPSQTLSLTCSVTGDSITSSYWNWIRKFPGNKLEYMGY
ITYSGNTYYTPSLKS RISITRDTSKNQYFLQLNSVTTEDTATYYCSRDY
GRGDYAMVYWGQGTSVTVSSASTKGPSVFPL APCSRSTSESTAALGCLV
KDYFPEPVTVSWNSGALTSGVHTFPAVLQSSGLYSLSSVVTVPSSSL GT
KTYTCNVDHKPSNTKVDKRVESKYGPPCPSCPAPEFLGGPSVFLFPPKPK
DTLMISRTPEVTC VVVDVSQEDPEVQFNWYVDGVEVHNAKTKPREEQFN
STYRVVSVLTVLHQDWLNGKEYKCKVSNK GLPSSIEKTISKAKGQPREP
QVYTLPPSQEEMTKNQVSLTCLVKGFYPSDIAVEWESNGQPENNY KTTP
PVLDSDGSFFLYSRLTVDKSRWQEGNVFSCSVMHEALHNHYTQKSLSLSL
GKGGGGAGGGG QVQLVESGGGVVQPGRSLRLDCKASGITFSNSGMHWVR
QAPGKGLEWVAVIWYDGSKRYYADSVK GRFTISRDNSKNTLFLQMNSLR
AEDTAVYYCATNDDYWGQGTLVTVSSGGGGSGGGGSGGGGSEI VLTQSP
ATLSLSPGERATLSCRASQSVSSYLAWYQQKPGQAPRLLIYDASNRATGI
PARFSGSGS GTDFTLTISSLEPEDFAVYYCQQSSNWPRTFGQGTKVEIK

### > Seq 276: 9.49-Nivolumab (MHC II (Pan-Allele)-PD-1)IgG4-SPLE C-Terminal scFv Bivalent Bispecific sAg-PD-1 scFv Orientation 1

[0935] > Light Chain:

DVVLTQSPATLSVTPGDSVSLSCRASQSIINNLHWYHQKSHESPRLLIKY
ASQSISGIPSRFSGS GSGTDFTLSINSVETEDFGVYFCQQSGSWPYTFG
GGSNLEIKRTVAAPSVFIFPPSDEQLKSGTA SVVCLLNNFYPREAKVQW
KVDNALQSGNSQESVTEQDSKDSTYSLSSTLTLSKADYEKHKVYACE VT
HQGLSSPVTKSFNRGEC

### > Seq 277: 9.49-Nivolumab IgG4-SPLE C-Terminal scFv Bivalent Bispecific sAg-PD-1 scFv Orientation 2

[0936] > Heavy Chain:

EVQLQESGPSLVRPSQTLSLTCSVTGDSITSSYWNWIRKFPGNKLEYMGY
ITYSGNTYYTPSLKS RISITRDTSKNQYFLQLNSVTTEDTATYYCSRDY
GRGDYAMVYWGQGTSVTVSSASTKGPSVFPL APCSRSTSESTAALGCLV
KDYFPEPVTVSWNSGALTSGVHTFPAVLQSSGLYSLSSVVTVPSSSL GT
KTYTCNVDHKPSNTKVDKRVESKYGPPCPSCPAPEFLGGPSVFLFPPKPK
DTLMISRTPEVTC VVVDVSQEDPEVQFNWYVDGVEVHNAKTKPREEQFN
STYRVVSVLTVLHQDWLNGKEYKCKVSNK GLPSSIEKTISKAKGQPREP
QVYTLPPSQEEMTKNQVSLTCLVKGFYPSDIAVEWESNGQPENNY KTTP
PVLDSDGSFFLYSRLTVDKSRWQEGNVFSCSVMHEALHNHYTQKSLSLSL
GKGGGGAGGGG EIVLTQSPATLSLSPGERATLSCRASQSVSSYLAWYQQ
KPGQAPRLLIYDASNRATGIPARFSGS GSGTDFTLTISSLEPEDFAVYY
CQQSSNWPRTFGQGTKVEIKGGGGSGGGGSGGGGSQVQLVESG GGVVQP
GRSLRLDCKASGITFSNSGMHWVRQAPGKGLEWVAVIWYDGSKRYYADSV
KGRFTISRD NSKNTLFLQMNSLRAEDTAVYYCATNDDYWGQGTLVTVSS

### > Seq 278: 9.49-Nivolumab (MHC II (Pan-Allele)-PD-1)IgG4-SPLE C-Terminal scFv Bivalent Bispecific sAg-PD-1 scFv Orientation 2

[0937] > Light Chain:

DVVLTQSPATLSVTPGDSVSLSCRASQSIINNLHWYHQKSHESPRLLIKY
ASQSISGIPSRFSGS GSGTDFTLSINSVETEDFGVYFCQQSGSWPYTFG
GGSNLEIKRTVAAPSVFIFPPSDEQLKSGTA SVVCLLNNFYPREAKVQW
KVDNALQSGNSQESVTEQDSKDSTYSLSSTLTLSKADYEKHKVYACE VT
HQGLSSPVTKSFNRGEC

### > Seq 279: 9.49-Nivolumab IgG4-SPLE C-Terminal scFv Bivalent Bispecific PD-1-sAg scFv Orientation 1

[0938] > Heavy Chain:

QVQLVESGGGVVQPGRSLRLDCKASGITFSNSGMHWVRQAPGKGLEWVAV
IWYDGSKRYYADSVK GRFTISRDNSKNTLFLQMNSLRAEDTAVYYCATN
DDYWGQGTLVTVSSASTKGPSVFPLAPCSRS TSESTAALGCLVKDYFPE
PVTVSWNSGALTSGVHTFPAVLQSSGLYSLSSVVTVPSSSLGTKTYT CN
VDHKPSNTKVDKRVESKYGPPCPSCPAPEFLGGPSVFLFPPKPKDTLMIS
RTPEVTCVVVDVS QEDPEVQFNWYVDGVEVHNAKTKPREEQFNSTYRVV
SVLTVLHQDWLNGKEYKCKVSNKGLPSSI EKTISKAKGQPREPQVYTLP
PSQEEMTKNQVSLTCLVKGFYPSDIAVEWESNGQPENNYKTTPPV LDSD
GSFFLYSRLTVDKSRWQEGNVFSCSVMHEALHNHYTQKSLSLSLGKGGGG
AGGGGEVQLQE SGPSLVRPSQTLSLTCSVTGDSITSSYWNWIRKFPGNK
LEYMGYITYSGNTYYTPSLKSRISITR DTSKNQYFLQLNSVTTEDTATY
YCSRDYGRGDYAMVYWGQGTSVTVSSGGGGSGGGGSGGGGSDV VLTQSP
ATLSVTPGDSVSLSCRASQSIINNLHWYHQKSHESPRLLIKYASQSISGI
PSRFSGSGS GTDFTLSINSVETEDFGVYFCQQSGSWPYTFGGGSNLEIK

### > Seq 280: 9.49-Nivolumab (MHC II (Pan-Allele)-PD-1)IgG4-SPLE C-Terminal scFv Bivalent Bispecific PD-1-sAg scFv Orientation 1

[0939] > Light Chain:

EIVLTQSPATLSLSPGERATLSCRASQSVSSYLAWYQQKPGQAPRLLIYD
ASNRATGIPARFSGS GSGTDFTLTISSLEPEDFAVYYCQQSSNWPRTFG
QGTKVEIKRTVAAPSVFIFPPSDEQLKSGTA SVVCLLNNFYPREAKVQW
KVDNALQSGNSQESVTEQDSKDSTYSLSSTLTLSKADYEKHKVYACE VT
HQGLSSPVTKSFNRGEC

### > Seq 281: 9.49-Nivolumab IgG4-SPLE C-Terminal scFv Bivalent Bispecific PD1-sAg scFv Orientation 2

[0940] > Heavy Chain:

QVQLVESGGGVVQPGRSLRLDCKASGITFSNSGMHWVRQAPGKGLEWVAV
IWYDGSKRYYADSVK GRFTISRDNSKNTLFLQMNSLRAEDTAVYYCATN
DDYWGQGTLVTVSSASTKGPSVFPLAPCSRS TSESTAALGCLVKDYFPE
PVTVSWNSGALTSGVHTFPAVLQSSGLYSLSSVVTVPSSSLGTKTYT CN
VDHKPSNTKVDKRVESKYGPPCPSCPAPEFLGGPSVFLFPPKPKDTLMIS
RTPEVTCVVVDVS QEDPEVQFNWYVDGVEVHNAKTKPREEQFNSTYRVV
SVLTVLHQDWLNGKEYKCKVSNKGLPSSI EKTISKAKGQPREPQVYTLP
PSQEEMTKNQVSLTCLVKGFYPSDIAVEWESNGQPENNYKTTPPV LDSD
GSFFLYSRLTVDKSRWQEGNVFSCSVMHEALHNHYTQKSLSLSLGKGGGG
AGGGGDVVLTQ SPATLSVTPGDSVSLSCRASQSIINNLHWYHQKSHESP
RLLIKYASQSISGIPSRFSGSGSGTDF TLSINSVETEDFGVYFCQQSGS
WPYTFGGGSNLEIKGGGGSGGGGSGGGGSEVQLQESGPSLVRP SQTLSL
TCSVTGDSITSSYWNWIRKFPGNKLEYMGYITYSGNTYYTPSLKSRISIT
RDTSKNQYF LQLNSVTTEDTATYYCSRDYGRGDYAMVYWGQGTSVTVSS

### > Seq 282: 9.49-Nivolumab (MHC II (Pan-Allele)-PD-1)IgG4-SPLE C-Terminal scFv Bivalent Bispecific PD1-sAg scFv Orientation 2

[0941] > Light Chain:

EIVLTQSPATLSLSPGERATLSCRASQSVSSYLAWYQQKPGQAPRLLIYD
ASNRATGIPARFSGS GSGTDFTLTISSLEPEDFAVYYCQQSSNWPRTFG
QGTKVEIKRTVAAPSVFIFPPSDEQLKSGTA SVVCLLNNFYPREAKVQW
KVDNALQSGNSQESVTEQDSKDSTYSLSSTLTLSKADYEKHKVYACE VT
HQGLSSPVTKSFNRGEC

### > Seq 283: 9.49-Nivolumab IgG1-KIH-LALA C-Terminal scFv PD1 Monovalent, sAg Bivalent Bispecific 1

[0942] > Heavy Chain 1:

EVQLQESGPSLVRPSQTLSLTCSVTGDSITSSYWNWIRKFPGNKLEYMGY
ITYSGNTYYTPSLKS RISITRDTSKNQYFLQLNSVTTEDTATYYCSRDY
GRGDYAMVYWGQGTSVTVSSASTKGPSVFPL APSSKSTSGGTAALGCLV
KDYFPEPVTVSWNSGALTSGVHTFPAVLQSSGLYSLSSVVTVPSSSL GT
QTYICNVNHKPSNTKVDKKVEPKSCDKTHTCPPCPAPEAAGGPSVFLFPP
KPKDTLMISRTPE VTCVVVDVSHEDPEVKFNWYVDGVEVHNAKTKPREE
QYNSTYRVVSVLTVLHQDWLNGKEYKCKV SNKALPAPIEKTISKAKGQP
REPQVYTLPPSRDELTKNQVSLWCLVKGFYPSDIAVEWESNGQPE NNYK
TTPPVLDSDGSFFLYSKLTVDKSRWQQGNVFSCSVMHEALHNHYTQKSLS
LSPGKGGGGAG GGGQVQLVESGGGVVQPGRSLRLDCKASGITFSNSGMH
WVRQAPGKGLEWVAVIWYDGSKRYYAD SVKGRFTISRDNSKNTLFLQMN
SLRAEDTAVYYCATNDDYWGQGTLVTVSSGGGGSGGGGSGGGG SEIVLT
QSPATLSLSPGERATLSCRASQSVSSYLAWYQQKPGQAPRLLIYDASNRA
TGIPARFSG SGSGTDFTLTISSLEPEDFAVYYCQQSSNWPRTFGQGTKV
EIK

### > Seq 284: 9.49-Nivolumab IgG1-KIH-LALA C-Terminal scFv PD1 Monovalent, sAg Bivalent Bispecific 1

[0943] > Heavy Chain 2:

EVQLQESGPSLVRPSQTLSLTCSVTGDSITSSYWNWIRKFPGNKLEYMGY
ITYSGNTYYTPSLKS RISITRDTSKNQYFLQLNSVTTEDTATYYCSRDY
GRGDYAMVYWGQGTSVTVSSASTKGPSVFPL APSSKSTSGGTAALGCLV
KDYFPEPVTVSWNSGALTSGVHTFPAVLQSSGLYSLSSVVTVPSSSL GT
QTYICNVNHKPSNTKVDKKVEPKSCDKTHTCPPCPAPEAAGGPSVFLFPP
KPKDTLMISRTPE VTCVVVDVSHEDPEVKFNWYVDGVEVHNAKTKPREE
QYNSTYRVVSVLTVLHQDWLNGKEYKCKV SNKALPAPIEKTISKAKGQP
REPQVYTLPPSRDELTKNQVSLWCLVKGFYPSDIAVEWESNGQPE NNYK
TTPPVLDSDGSFFLYSKLTVDKSRWQQGNVFSCSVMHEALHNHYTQKSLS
LSPGK

### > Seq 285: 9.49-Nivolumab (MHC II (Pan-Allele)-PD-1)IgG1-KIH-LALA C-Terminal scFv PD1 Monovalent, sAg Bivalent Bispecific 1

[0944] > Light Chain:

DVVLTQSPATLSVTPGDSVSLSCRASQSIINNLHWYHQKSHESPRLLIKY
ASQSISGIPSRFSGS GSGTDFTLSINSVETEDFGVYFCQQSGSWPYTFG
GGSNLEIKRTVAAPSVFIFPPSDEQLKSGTA SVVCLLNNFYPREAKVQW
KVDNALQSGNSQESVTEQDSKDSTYSLSSTLTLSKADYEKHKVYACE VT
HQGLSSPVTKSFNRGEC

### > Seq 286: 9.49-Nivolumab IgG1-KIH-LALA C-Terminal scFv PD1 Monovalent, sAg Bivalent Bispecific 2

[0945] > Heavy Chain 1:

EVQLQESGPSLVRPSQTLSLTCSVTGDSITSSYWNWIRKFPGNKLEYMGY
ITYSGNTYYTPSLKS RISITRDTSKNQYFLQLNSVTTEDTATYYCSRDY
GRGDYAMVYWGQGTSVTVSSASTKGPSVFPL APSSKSTSGGTAALGCLV
KDYFPEPVTVSWNSGALTSGVHTFPAVLQSSGLYSLSSVVTVPSSSL GT
QTYICNVNHKPSNTKVDKKVEPKSCDKTHTCPPCPAPEAAGGPSVFLFPP
KPKDTLMISRTPE VTCVVVDVSHEDPEVKFNWYVDGVEVHNAKTKPREE
QYNSTYRVVSVLTVLHQDWLNGKEYKCKV SNKALPAPIEKTISKAKGQP
REPQVYTLPPSRDELTKNQVSLWCLVKGFYPSDIAVEWESNGQPE NNYK
TTPPVLDSDGSFFLYSKLTVDKSRWQQGNVFSCSVMHEALHNHYTQKSLS
LSPGKGGGGAG GGGEIVLTQSPATLSLSPGERATLSCRASQSVSSYLAW
YQQKPGQAPRLLIYDASNRATGIPARF SGSGSGTDFTLTISSLEPEDFA
VYYCQQSSNWPRTFGQGTKVEIKGGGGSGGGGSGGGGSQVQLV ESGGGV
VQPGRSLRLDCKASGITFSNSGMHWVRQAPGKGLEWVAVIWYDGSKRYYA
DSVKGRFTI SRDNSKNTLFLQMNSLRAEDTAVYYCATNDDYWGQGTLVT
VSS

### > Seq 286: 9.49-Nivolumab IgG1-KIH-LALA C-Terminal scFv PD1 Monovalent, sAg Bivalent Bispecific 2

[0946] > Heavy Chain 2:

EVQLQESGPSLVRPSQTLSLTCSVTGDSITSSYWNWIRKFPGNKLEYMGY
ITYSGNTYYTPSLKS RISITRDTSKNQYFLQLNSVTTEDTATYYCSRDY
GRGDYAMVYWGQGTSVTVSSASTKGPSVFPL APSSKSTSGGTAALGCLV
KDYFPEPVTVSWNSGALTSGVHTFPAVLQSSGLYSLSSVVTVPSSSL GT
QTYICNVNHKPSNTKVDKKVEPKSCDKTHTCPPCPAPEAAGGPSVFLFPP
KPKDTLMISRTPE VTCVVVDVSHEDPEVKFNWYVDGVEVHNAKTKPREE
QYNSTYRVVSVLTVLHQDWLNGKEYKCKV SNKALPAPIEKTISKAKGQP
REPQVYTLPPSRDELTKNQVSLWCLVKGFYPSDIAVEWESNGQPE NNYK
TTPPVLDSDGSFFLYSKLTVDKSRWQQGNVFSCSVMHEALHNHYTQKSLS
LSPGK

### > Seq 287: 9.49-Nivolumab (MHC II (Pan-Allele)-PD-1)IgG1-KIH-LALA C-Terminal scFv PD1 Monovalent, sAg Bivalent bispecific 2

[0947] > Light Chain:

DVVLTQSPATLSVTPGDSVSLSCRASQSIINNLHWYHQKSHESPRLLIKY
ASQSISGIPSRFSGS GSGTDFTLSINSVETEDFGVYFCQQSGSWPYTFG
GGSNLEIKRTVAAPSVFIFPPSDEQLKSGTA SVVCLLNNFYPREAKVQW
KVDNALQSGNSQESVTEQDSKDSTYSLSSTLTLSKADYEKHKVYACE VT
HQGLSSPVTKSFNRGEC

### > Seq 288: 9.49-Nivolumab IgG1-KIH-LALA C-Terminal scFv PD1 Monovalent, sAg Bivalent Bispecific 3

[0948] > Heavy Chain 1:

EVQLQESGPSLVRPSQTLSLTCSVTGDSITSSYWNWIRKFPGNKLEYMGY
ITYSGNTYYTPSLKS RISITRDTSKNQYFLQLNSVTTEDTATYYCSRDY
GRGDYAMVYWGQGTSVTVSSASTKGPSVFPL APSSKSTSGGTAALGCLV
KDYFPEPVTVSWNSGALTSGVHTFPAVLQSSGLYSLSSVVTVPSSSL GT
QTYICNVNHKPSNTKVDKKVEPKSCDKTHTCPPCPAPEAAGGPSVFLFPP
KPKDTLMISRTPE VTCVVVDVSHEDPEVKFNWYVDGVEVHNAKTKPREE
QYNSTYRVVSVLTVLHQDWLNGKEYKCKV SNKALPAPIEKTISKAKGQP
REPQVYTLPPSRDELTKNQVSLWCLVKGFYPSDIAVEWESNGQPE NNYK
TTPPVLDSDGSFFLYSKLTVDKSRWQQGNVFSCSVMHEALHNHYTQKSLS
LSPGKGGGGAG GGGQVQLVESGGGVVQPGRSLRLDCKASGITFSNSGMH
WVRQAPGKGLEWVAVIWYDGSKRYYAD SVKGRFTISRDNSKNTLFLQMN
SLRAEDTAVYYCATNDDYWGQGTLVTVSSGGGGSGGGGSGGGG SEIVLT
QSPATLSLSPGERATLSCRASQSVSSYLAWYQQKPGQAPRLLIYDASNRA
TGIPARFSG SGSGTDFTLTISSLEPEDFAVYYCQQSSNWPRTFGQGTKV
EIK

### > Seq 289: 9.49-Nivolumab IgG1-KIH-LALA C-Terminal scFv PD1 Monovalent, sAg Bivalent Bispecific 3

[0949] > Heavy Chain 2:

EVQLQESGPSLVRPSQTLSLTCSVTGDSITSSYWNWIRKFPGNKLEYMGY
ITYSGNTYYTPSLKS RISITRDTSKNQYFLQLNSVTTEDTATYYCSRDY
GRGDYAMVYWGQGTSVTVSSASTKGPSVFPL APSSKSTSGGTAALGCLV
KDYFPEPVTVSWNSGALTSGVHTFPAVLQSSGLYSLSSVVTVPSSSL GT
QTYICNVNHKPSNTKVDKKVEPKSCDKTHTCPPCPAPEAAGGPSVFLFPP
KPKDTLMISRTPE VTCVVVDVSHEDPEVKFNWYVDGVEVHNAKTKPREE
QYNSTYRVVSVLTVLHQDWLNGKEYKCKV SNKALPAPIEKTISKAKGQP
REPQVYTLPPSRDELTKNQVSLWCLVKGFYPSDIAVEWESNGQPE NNYK
TTPPVLDSDGSFFLYSKLTVDKSRWQQGNVFSCSVMHEALHNHYTQKSLS
LSPGK

### > Seq 290: 9.49-Nivolumab (MHC II (Pan-Allele)-PD-1)IgG1-KIH-LALA C-Terminal scFv PD1 Monovalent, sAg Bivalent Bispecific 3

[0950] > Light Chain:

DVVLTQSPATLSVTPGDSVSLSCRASQSIINNLHWYHQKSHESPRLLIKY
ASQSISGIPSRFSGS GSGTDFTLSINSVETEDFGVYFCQQSGSWPYTFG
GGSNLEIKRTVAAPSVFIFPPSDEQLKSGTA SVVCLLNNFYPREAKVQW
KVDNALQSGNSQESVTEQDSKDSTYSLSSTLTLSKADYEKHKVYACE VT
HQGLSSPVTKSFNRGEC

### > Seq 291: 9.49-Nivolumab IgG1-KIH-LALA C-Terminal scFv PD1 Monovalent, sAg Bivalent Bispecific 4

[0951] > Heavy Chain 1:

EVQLQESGPSLVRPSQTLSLTCSVTGDSITSSYWNWIRKFPGNKLEYMGY
ITYSGNTYYTPSLKS RISITRDTSKNQYFLQLNSVTTEDTATYYCSRDY
GRGDYAMVYWGQGTSVTVSSASTKGPSVFPL APSSKSTSGGTAALGCLV
KDYFPEPVTVSWNSGALTSGVHTFPAVLQSSGLYSLSSVVTVPSSSL GT
QTYICNVNHKPSNTKVDKKVEPKSCDKTHTCPPCPAPEAAGGPSVFLFPP
KPKDTLMISRTPE VTCVVVDVSHEDPEVKFNWYVDGVEVHNAKTKPREE
QYNSTYRVVSVLTVLHQDWLNGKEYKCKV SNKALPAPIEKTISKAKGQP
REPQVYTLPPSRDELTKNQVSLWCLVKGFYPSDIAVEWESNGQPE NNYK
TTPPVLDSDGSFFLYSKLTVDKSRWQQGNVFSCSVMHEALHNHYTQKSLS
LSPGKGGGGAG GGGEIVLTQSPATLSLSPGERATLSCRASQSVSSYLAW
YQQKPGQAPRLLIYDASNRATGIPARF SGSGSGTDFTLTISSLEPEDFA
VYYCQQSSNWPRTFGQGTKVEIKGGGGSGGGGSGGGGSQVQLV ESGGGV
VQPGRSLRLDCKASGITFSNSGMHWVRQAPGKGLEWVAVIWYDGSKRYYA
DSVKGRFTI SRDNSKNTLFLQMNSLRAEDTAVYYCATNDDYWGQGTLVT
VSS

### > Seq 292: 9.49-Nivolumab (MHC II (Pan-Allele)-PD-1)IgG1-KIH-LALA C-Terminal scFv PD1 Monovalent, sAg Bivalent Bispecific 4

[0952] > Heavy Chain 2:

EVQLQESGPSLVRPSQTLSLTCSVTGDSITSSYWNWIRKFPGNKLEYMGY
ITYSGNTYYTPSLKS RISITRDTSKNQYFLQLNSVTTEDTATYYCSRDY
GRGDYAMVYWGQGTSVTVSSASTKGPSVFPL APSSKSTSGGTAALGCLV
KDYFPEPVTVSWNSGALTSGVHTFPAVLQSSGLYSLSSVVTVPSSSL GT
QTYICNVNHKPSNTKVDKKVEPKSCDKTHTCPPCPAPEAAGGPSVFLFPP
KPKDTLMISRTPE VTCVVVDVSHEDPEVKFNWYVDGVEVHNAKTKPREE
QYNSTYRVVSVLTVLHQDWLNGKEYKCKV SNKALPAPIEKTISKAKGQP
REPQVYTLPPSRDELTKNQVSLWCLVKGFYPSDIAVEWESNGQPE NNYK
TTPPVLDSDGSFFLYSKLTVDKSRWQQGNVFSCSVMHEALHNHYTQKSLS
LSPGK

### > Seq 293: 9.49-Nivolumab (MHC II (Pan-Allele)-PD-1)IgG1-KIH-LALA C-Terminal scFv PD1 Monovalent, sAg Bivalent bispecific 4

[0953] > Light Chain:

DVVLTQSPATLSVTPGDSVSLSCRASQSIINNLHWYHQKSHESPRLLIKY
ASQSISGIPSRFSGS GSGTDFTLSINSVETEDFGVYFCQQSGSWPYTFG
GGSNLEIKRTVAAPSVFIFPPSDEQLKSGTA SVVCLLNNFYPREAKVQW
KVDNALQSGNSQESVTEQDSKDSTYSLSSTLTLSKADYEKHKVYACE VT
HQGLSSPVTKSFNRGEC

### > Seq 294: 9.49-Nivolumab IgG1-KIH-LALA Monovalent Bispecific 1

[0954] > Heavy Chain 1:

EVQLQESGPSLVRPSQTLSLTCSVTGDSITSSYWNWIRKFPGNKLEYMGY
ITYSGNTYYTPSLKS RISITRDTSKNQYFLQLNSVTTEDTATYYCSRDY
GRGDYAMVYWGQGTSVTVSSASTKGPSVFPL APSSKSTSGGTAALGCLV
KDYFPEPVTVSWNSGALTSGVHTFPAVLQSSGLYSLSSVVTVPSSSL GT
QTYICNVNHKPSNTKVDKKVEPKSCDKTHTCPPCPAPEAAGGPSVFLFPP
KPKDTLMISRTPE VTCVVVDVSHEDPEVKFNWYVDGVEVHNAKTKPREE
QYNSTYRVVSVLTVLHQDWLNGKEYKCKV SNKALPAPIEKTISKAKGQP
REPQVYTLPPSRDELTKNQVSLWCLVKGFYPSDIAVEWESNGQPE NNYK
TTPPVLDSDGSFFLYSKLTVDKSRWQQGNVFSCSVMHEALHNHYTQKSLS
LSPGK

### > Seq 295: 9.49-Nivolumab (MHC II (Pan-Allele)-PD-1)IgG1-KIH-LALA Monovalent Bispecific 1

[0955] > Heavy Chain 2:

QVQLVESGGGVVQPGRSLRLDCKASGITFSNSGMHWVRQAPGKGLEWVAV
IWYDGSKRYYADSVK GRFTISRDNSKNTLFLQMNSLRAEDTAVYYCATN
DDYWGQGTLVTVSSASTKGPSVFPLAPSSKS TSGGTAALGCLVKDYFPE
PVTVSWNSGALTSGVHTFPAVLQSSGLYSLSSVVTVPSSSLGTQTYI CN
VNHKPSNTKVDKKVEPKSCDKTHTCPPCPAPEAAGGPSVFLFPPKPKDTL
MISRTPEVTCVVV DVSHEDPEVKFNWYVDGVEVHNAKTKPREEQYNSTY
RVVSVLTVLHQDWLNGKEYKCKVSNKALP APIEKTISKAKGQPREPQVY
TLPPSRDELTKNQVSLWCLVKGFYPSDIAVEWESNGQPENNYKTT PPVL
DSDGSFFLYSKLTVDKSRWQQGNVFSCSVMHEALHNHYTQKSLSLSPGK

### > Seq 296: 9.49-Nivolumab (MHC II (Pan-Allele)-PD-1)IgG1-KIH-LALA Monovalent Bispecific 1

[0956] > Light Chain 1:

DVVLTQSPATLSVTPGDSVSLSCRASQSIINNLHWYHQKSHESPRLLIKY
ASQSISGIPSRFSGS GSGTDFTLSINSVETEDFGVYFCQQSGSWPYTFG
GGSNLEIKRTVAAPSVFIFPPSDEQLKSGTA SVVCLLNNFYPREAKVQW
KVDNALQSGNSQESVTEQDSKDSTYSLSSTLTLSKADYEKHKVYACE VT
HQGLSSPVTKSFNRGEC

### > Seq 297: 9.49-Nivolumab (MHC II (Pan-Allele)-PD-1)IgG1-KIH-LALA Monovalent Bispecific 1

[0957] > Light Chain 2:

EIVLTQSPATLSLSPGERATLSCRASQSVSSYLAWYQQKPGQAPRLLIYD
ASNRATGIPARFSGS GSGTDFTLTISSLEPEDFAVYYCQQSSNWPRTFG
QGTKVEIKRTVAAPSVFIFPPSDEQLKSGTA SVVCLLNNFYPREAKVQW
KVDNALQSGNSQESVTEQDSKDSTYSLSSTLTLSKADYEKHKVYACE VT
HQGLSSPVTKSFNRGEC

### > Seq 298: 9.49-Nivolumab IgG1-KIH-LALA Monovalent Bispecific 2

[0958] > Heavy Chain 1:

EVQLQESGPSLVRPSQTLSLTCSVTGDSITSSYWNWIRKFPGNKLEYMGY
ITYSGNTYYTPSLKS RISITRDTSKNQYFLQLNSVTTEDTATYYCSRDY
GRGDYAMVYWGQGTSVTVSSASTKGPSVFPL APSSKSTSGGTAALGCLV
KDYFPEPVTVSWNSGALTSGVHTFPAVLQSSGLYSLSSVVTVPSSSL GT
QTYICNVNHKPSNTKVDKKVEPKSCDKTHTCPPCPAPEAAGGPSVFLFPP
KPKDTLMISRTPE VTCVVVDVSHEDPEVKFNWYVDGVEVHNAKTKPREE
QYNSTYRVVSVLTVLHQDWLNGKEYKCKV SNKALPAPIEKTISKAKGQP
REPQVYTLPPSRDELTKNQVSLWCLVKGFYPSDIAVEWESNGQPE NNYK
TTPPVLDSDGSFFLYSKLTVDKSRWQQGNVFSCSVMHEALHNHYTQKSLS
LSPGK

### > Seq 299: 9.49-Nivolumab (MHC II (Pan-Allele)-PD-1)IgG1-KIH-LALA Monovalent Bispecific 2

[0959] > Heavy Chain 2:

QVQLVESGGGVVQPGRSLRLDCKASGITFSNSGMHWVRQAPGKGLEWVAV
IWYDGSKRYYADSVK GRFTISRDNSKNTLFLQMNSLRAEDTAVYYCATN
DDYWGQGTLVTVSSASTKGPSVFPLAPSSKS TSGGTAALGCLVKDYFPE
PVTVSWNSGALTSGVHTFPAVLQSSGLYSLSSVVTVPSSSLGTQTYI CN
VNHKPSNTKVDKKVEPKSCDKTHTCPPCPAPEAAGGPSVFLFPPKPKDTL
MISRTPEVTCVVV DVSHEDPEVKFNWYVDGVEVHNAKTKPREEQYNSTY
RVVSVLTVLHQDWLNGKEYKCKVSNKALP APIEKTISKAKGQPREPQVY
TLPPSRDELTKNQVSLWCLVKGFYPSDIAVEWESNGQPENNYKTT PPVL
DSDGSFFLYSKLTVDKSRWQQGNVFSCSVMHEALHNHYTQKSLSLSPGK

### > Seq 300: 9.49-Nivolumab (MHC II (Pan-Allele)-PD-1)IgG1-KIH-LALA Monovalent Bispecific 2

[0960] > Light Chain 1:

DVVLTQSPATLSVTPGDSVSLSCRASQSIINNLHWYHQKSHESPRLLIKY
ASQSISGIPSRFSGS GSGTDFTLSINSVETEDFGVYFCQQSGSWPYTFG
GGSNLEIKRTVAAPSVFIFPPSDEQLKSGTA SVVCLLNNFYPREAKVQW
KVDNALQSGNSQESVTEQDSKDSTYSLSSTLTLSKADYEKHKVYACE VT
HQGLSSPVTKSFNRGEC

### > Seq 301: 9.49-Nivolumab (MHC II (Pan-Allele)-PD-1)IgG1-KIH-LALA Monovalent Bispecific 2

[0961] > Light Chain 2:

EIVLTQSPATLSLSPGERATLSCRASQSVSSYLAWYQQKPGQAPRLLIYD
ASNRATGIPARFSGS GSGTDFTLTISSLEPEDFAVYYCQQSSNWPRTFG
QGTKVEIKRTVAAPSVFIFPPSDEQLKSGTA SVVCLLNNFYPREAKVQW
KVDNALQSGNSQESVTEQDSKDSTYSLSSTLTLSKADYEKHKVYACE VT
HQGLSSPVTKSFNRGEC

[0962] It is to be understood that each of these LoSTIM constructs can be further engineered using standard and well-known methods in the art and described herein to further comprise sequences of interest described herein, including, without limitation, humanization, antibody formats of interest, engineered Fc domains, linkers, and the like.

[0963] Numerous designs and strategies for producing bispecific antibodies described herein are contemplated and may be applied to any embodiment in any combination. For example, some embodiments include Fc domains and others do not, this results in advantages and disadvantages from a pharmacokinetic and drug distribution standpoint. Some embodiments are multivalent, that is they have multiple binding sites for each antigen, and some are monovalent, that is they have a single binding site for each antigen.

[0964] Some embodiments have a single binding site for one antigen and multiple binding sites for the other antigen. Some embodiments involve asymmetric pairing of heavy chains using “knob-in-hole” or electrostatic steering techniques and others involve linking single-chain variable fragments (scFv) to aminotermini or carboxytermini of the heavy or light chains. A diversity of artificial linkers can be used to connect scFv to the heavy or light chains, such glycine-serine and glycine-alanine linkers. Variable regions for the two binding partners can also be connected to one another without an Fc domain in a variety of orientations by artificial linkers, resulting in designs such as diabodies and “bi-specific T-cell engagers.” The plethora of bispecific designs is the subject of a number of review articles, which include a more comprehensive listing of known bispecific antibody designs (see, for example, Brinkmann and Kontermann (2017) MABS 9(2): 182-212).

[0965] In some embodiments, the cell type-specific marker is MHC class II. MHC class II is a cell type-specific marker for professional antigen presenting cells (APCs). Other cells or tissue types do not express this marker. Thus, a class II MHC-specific LoSTIM selectively prevents T-cell activation by these cells, which prevents or inhibits T-cell activation by professional APCs and resulting in inhibition of T-cell priming and inhibition of T-cell responses against antigens that are being presented by those APCs. Another result is inhibition of B-cell class-switching and affinity maturation, since B-cells are professional APCs that express MHC class II and T-cell help is necessary for these processes, which requires direct interaction with T-cells. Thus, an MHC class II-specific LoSTIM may be used as an immunosuppressant to engender T-cell (cell mediated) and B-cell (humoral) tolerance against antigens. These may be antigens that are naturally presented by the body during autoimmune disease or undesirable allogeneic immune responses, such as in organ transplantation. Similarly, antigens may be exogenously administered concurrently with an MHC class II-specific LoSTIM to engender immunologic tolerance against those antigens.

### Example 4: LoSTIM Agents May Be Used to Treat Clinical Indications

[0966] LoSTIM agents may be used to treat subjects at risk of, suspected of having, or afflicted with a variety of clinical indications depending on the LoSTIM’s design, as described herein, such as cancer, autoimmune disease, GVHD, irAE, and the like, using routine procedures described herein and well-known in the art.

[0967] For example, colitis is a common irAE following PD-1/PD-L1 inhibition (Alessandrino et al. (2019) Abdom. Radiol. (NY) 44(5):1917-1927). A variant of the experimental autoimmune colitis model is dependent upon CD8 T-cell activity (Punit et al. (2015) Gastroenterol. 149(4):993-1005; Tajima et al. (2008) J. Exp. Med. 205:1019-1027). CD8⁺C44^{low}CD62L⁺ cells are purified from C57BL/6 peripheral nodes via flow cytometry sorting and adoptively transferred to immunodeficient C57BL/6 Rag2-/- recipients as previously described in Punit et al. (2015) Gastroenterol. 149(4):993-1005. The onset of colitis typically occurs 4-5 weeks after adoptive transfer. Either before the onset (prophylactic studies) or after the onset (therapeutic studies), treatment is initiatied with an H-2Kb-specific LoSTIM, AF6-88.5.3 (parental anti-H-2Kb), 29F.1A12 (parental anti-PD1), or PBS. This experiment is performed separately with an EpCAM-specific LoSTIM along with appropriate controls including parent anti-EpCAM monospecific and parent anti-PD1 monospecific antibodies and PBS as a vehicle control. Since C57BL/6 tissues express H-2K^{b} and also express EpCAM, the aforementioned LoSTIMs will bind to their surface and are expected to inhibit T-cell activity and ameliorate immune-mediated colitis in this model.

### Example 5: Materials and Methods

### Design and Production of the LoSTIM

[0968] The proof-of-concept LoSTIM was created in a bispecific antibody format. To do so, first the sequence of the variable regions of the heavy chain (V_{H}) and light chain (V_{L}) of the AF6-88.5.3 hybridoma were determined, which expresses a mouse IgG2a kappa anti-H-2K^{b} monoclonal antibody. The AF6-88.5.3 hybridoma was obtained from the American Type Culture Collection (ATCC). cDNAs containing the V_{H} and V_{L} were prepared by Rapid Amplification of cDNA Ends (RACE). The resultant antibody variable region cDNA fragments were cloned into a TOPO vector (LakePharma, Inc). A total of 14 clones were amplified by polymerase chain reaction (PCR) and purified by gel electrophoresis and recovery. Each amplified and purified clone was subjected to Sanger sequencing, resulting in a single V_{H} and a single V_{L} consensus sequence.

[0969] The LoSTIM bispecific antibody protein sequence was designed as follows. The amino acid translation of the AF6-88.5.3 V_{H} sequence was appended to the aminoterminus of an amino acid sequence of the mouse IgG2a CH1 domain, hinge region, and Fc domain. The Fc domain included point substitutions known to decrease Fcγ receptor binding and C1q binding: L235E, E318A, K320A, and K322A (Duncan et al. (1988) Nature 332(6164):563-4; Duncan and Winter (1988) Nature 332(6166):738-40; Steurer et al. (1995) J Immunol. 155(3):1165-74). To create a LoSTIM capable of binding to both H-2K^{b} and PD-1, a single-chain variable fragment (scFv) sequence containing the amino acid sequences of the variable regions of the anti-PD-1 monoclonal antibody 29F.1A12 was constructed and appended to the carboxyterminus of the Fc domain, with the two sequences separated by the flexible linker sequence GGGGAGGGG (SEQ ID NO: 16). The V_{H} and V_{L} sequences of 29F.1A12 had been previously obtained by the method described in the preceding paragraph. To create the scFv sequence, the 29F.1A12 V_{L} sequence was appended to the aminoterminus of the 29F.1A12 V_{H} sequence, with the two sequences being separated by the flexible linker sequence GGGGSGGGGSGGGGS (SEQ ID NO: 17). To create the light chain amino acid sequence, the AF6-88.5.3 V_{L} was appended directly to the aminoterminus of the mouse kappa-chain constant region. The nucleotide sequences encoding the heavy chain and light chain of the LoSTIM were obtained by computational reverse-transcription and codon optimization. A nucleotide sequence encoding the signal peptide MEWSWVFLFFLSVTTGVHS (SEQ ID NO: 18) was appended immediately 5′ to both the heavy and light chain nucleotide sequences.

[0970] AF6-88.5.3 V_{H} nucleotide sequence (SEQ ID NO: 19)

GATGTGCAGCTGGTGGAGTCTGGGGGAGGCTTAGTGCAGCCTGGAGGGTC
CCGGAAACTCTCCTGTGCAGCCTCTGGATTCACTTTCAGTAGCTTTGGAA
TGCACTGGGTTCGTCAGGCTCCAGAGAAGGGGCTGGAGTGGGTCGCATAC
ATTAGTAGTGGCAGTAATACCATCTACTATGCAGACACAGTGAAGGGCCG
ATTCACCATCTCCAGAGACAATCCCAAGAACACCCTGTTCCTGCAAATGA
CCAGTCTAAGGTCTGAGGACACGGCCATGTATTATTGTGCACTTACGACG
GGGTCCTGGTTTGCTTACTGGGGCCAAGGGACTCTGGTCACTGTCTCTGC
A

[0971] AF6-88.5.3 V_{L} nucleotide sequence (SEQ ID NO: 20)

GACATCTTGCTGACTCAGTCTCCAGCCATCCTGTCTGTGCGTCCAGGAGA
AAGAGTCAGTTTCTCCTGCAGGGCCAGTCAGAGCCTTGGCACAAGCATAC
ACTGGTATCAGCAAAGAACAGATGGTTCTCCAAGGCTTCTCATAAAATAT
GCTTCTGAGTCTATCTCTGGGATCCCTTCCAGGTTTAGTGGCAGTGGATC
AGGGACAGATTTTACTCTTAGCATCAACAGTGTGGAGTCTGAAGATATTG
CAGATTATTACTGTCAACAAAGTAATAGCTGGCCAATCACGTTCGGTGCT
GGGACCAAGCTGGAGCTGAAA

[0972] AF6-88.5.3 V_{H} amino acid sequence (SEQ ID NO: 21)

DVQLVESGGGLVQPGGSRKLSCAASGFTFSSFGMHWVRQAPEKGLEWVAY
ISSGSNTIYYADTVKGRFTISRDNPKNTLFLQMTSLRSEDTAMYYCALTT
GSWFAYWGQGTLVTVSA

[0973] AF6-88.5.3 V_{L} amino acid sequence (SEQ ID NO: 22)

DILLTQSPAILSVRPGERVSFSCRASQSLGTSIHWYQQRTDGSPRLLIKY
ASESISGIPSRFSGSGSGTDFTLSINSVESEDIADYYCQQSNSWPITFGA
GTKLELK

[0974] mIgG2a CH1, hinge region, and Fc domain including L235E, E318A, K320A, and K322A substitutions (SEQ ID NO: 23)

AKTTAPSVYPLAPVCGDTTGSSVTLGCLVKGYFPEPVTLTWNSGSLSSGV
HTFPAVLQSDLYTLSSSVTVTSSTWPSQSITCNVAHPASSTKVDKKIEPR
GPTIKPCPPCKCPAPNLE GGPSVFIFPPKIKDVLMISLSPIVTCVVVDVS
EDDPDVQISWFVNNVEVHTAQTQTHREDYNSTLRVVSALPIQHQDWMSGK A FA CA VNNKDLPAPIERTISKPKGSVRAPQVYVLPPPEEEMTKKQVTLTC
MVTDFMPEDIYVEWTNNGKTELNYKNTEPVLDSDGSYFMYSKLRVEKKNW
VERNSYSCSVVHEGLHNHHTTKSFSRTPGK

[0975] 29F.1A12 scFv sequence (SEQ ID NO: 24)

DVALTQTPVAQPVTLGDQASISCRSSQSLVHSNGRTYLEWYLQKPGQSPQ
LLIYKVSNRFSGVPDRFIGSGSGSDFTLTISRVEPEDLGVYYCFQATHDP
NTFGAGTKLELKGGGGSGGGGSGGGGSQVQLQQSGAELVKPGSSVKISCK
ASGYTFTSHFIHWIKQQPGNGLEWIGGIYPGDGDTEYNQQFNGKATLTAD
KSSSTAYMRLSSLTSEDSAVYFCATRVPSYWFFDFWGPGTMVTVSS

[0976] Full heavy chain amino acid sequence of the LoSTIM heavy chain, including leader sequence (SEQ ID NO: 25)

MEWSWVFLFFLSVTTGVHSDVQLVESGGGLVQPGGSRKLSCAASGFTFSS
FGMHWVRQAPEKGLEWVAYISSGSNTIYYADTVKGRFTISRDNPKNTLFL
QMTSLRSEDTAMYYCALTTGSWFAYWGQGTLVTVSAAKTTAPSVYPLAPV
CGDTTGSSVTLGCLVKGYFPEPVTLTWNSGSLSSGVHTFPAVLQSDLYTL
SSSVTVTSSTWPSQSITCNVAHPASSTKVDKKIEPRGPTIKPCPPCKCPA
PNLEGGPSVFIFPPKIKDVLMISLSPIVTCVVVDVSEDDPDVQISWFVNN
VEVHTAQTQTHREDYNSTLRVVSALPIQHQDWMSGKAFACAVNNKDLPAP
IERTISKPKGSVRAPQVYVLPPPEEEMTKKQVTLTCMVTDFMPEDIYVEW
TNNGKTELNYKNTEPVLDSDGSYFMYSKLRVEKKNWVERNSYSCSVVHEG
LHNHHTTKSFSRTPGKGGGGAGGGGDVALTQTPVAQPVTLGDQASISCRS
SQSLVHSNGRTYLEWYLQKPGQSPQLLIYKVSNRFSGVPDRFIGSGSGSD
FTLTISRVEPEDLGVYYCFQATHDPNTFGAGTKLELKGGGGSGGGGSGGG
GSQVQLQQSGAELVKPGSSVKISCKASGYTFTSHFIHWIKQQPGNGLEWI
GGIYPGDGDTEYNQQFNGKATLTADKSSSTAYMRLSSLTSEDSAVYFCAT
RVPSYWFFDFWGPGTMVTVSS

[0977] Full light chain amino acid sequence of the LoSTIM, including leader sequence (SEQ ID NO: 26)

MEWSWVFLFFLSVTTGVHSDILLTQSPAILSVRPGERVSFSCRASQSLGT
SIHWYQQRTDGSPRLLIKYASESISGIPSRFSGSGSGTDFTLSINSVESE
DIADYYCQQSNSWPITFGAGTKLELKRADAAPTVSIFPPSSEQLTSGGAS
VVCFLNNFYPKDINVKWKIDGSERQNGVLNSWTDQDSKDSTYSMSSTLTL
TKDEYERHNSYTCEATHKTSTSPIVKSFNRNEC

[0978] Full nucleotide sequence of the LoSTIM heavy chain, including leader sequence (SEQ ID NO: 27)

ATGGAATGGAGCTGGGTCTTTCTCTTCTTCCTGTCAGTAACGACTGGTGT
CCACTCCGACGTGCAGCTGGTGGAGAGCGGCGGTGGCCTGGTGCAGCCCG
GAGGTAGCAGGAAGCTGAGCTGCGCCGCAAGCGGCTTCACCTTTAGCAGC
TTCGGCATGCACTGGGTGAGGCAAGCCCCCGAGAAGGGCCTGGAGTGGGT
GGCATACATCAGCAGCGGCAGCAACACCATCTACTACGCCGACACCGTGA
AGGGCAGGTTCACCATTAGCAGGGACAACCCCAAAAACACCCTGTTCCTG
CAGATGACCAGCCTGAGGAGCGAGGACACCGCCATGTACTACTGCGCCCT
GACCACCGGCTCTTGGTTTGCCTACTGGGGCCAGGGCACCCTGGTGACCG
TGAGCGCCGCTAAAACAACAGCCCCATCGGTCTATCCACTGGCCCCTGTG
TGTGGAGATACAACTGGCTCCTCGGTGACTCTAGGATGCCTGGTCAAGGG
TTATTTCCCTGAGCCAGTGACCTTGACCTGGAACTCTGGTTCCCTGTCCA
GTGGTGTGCACACCTTCCCAGCTGTCCTGCAGTCTGACCTCTACACCCTC
AGCTCAAGCGTGACTGTAACCAGCTCGACCTGGCCCAGCCAGTCCATCAC
CTGCAATGTGGCCCACCCGGCAAGCAGCACCAAGGTGGACAAGAAAATTG
AGCCCAGAGGGCCCACAATCAAGCCCTGTCCTCCATGCAAATGCCCAGCA
CCTAACCTCGAGGGTGGACCATCCGTCTTCATCTTCCCTCCAAAGATCAA
GGATGTACTCATGATCTCCCTGAGCCCCATAGTCACATGTGTAGTCGTTG
ATGTGAGCGAGGATGACCCAGATGTCCAGATCAGCTGGTTTGTGAACAAC
GTGGAAGTGCACACTGCTCAGACACAGACGCATAGAGAGGATTACAACAG
TACTCTCCGGGTTGTCAGTGCCCTCCCCATCCAGCACCAGGACTGGATGA
GTGGCAAGGCCTTCGCATGCGCTGTCAACAACAAAGACCTCCCAGCGCCC
ATCGAGAGAACCATCTCAAAACCCAAAGGGTCAGTAAGAGCTCCACAGGT
ATATGTCTTGCCTCCACCAGAAGAGGAGATGACTAAGAAACAGGTCACTC
TGACCTGCATGGTCACAGACTTCATGCCTGAAGACATTTACGTGGAGTGG
ACCAACAACGGGAAAACAGAGCTAAACTACAAGAACACTGAACCAGTCCT
GGACTCTGATGGTTCTTACTTCATGTACAGCAAGCTGAGAGTGGAGAAGA
AGAACTGGGTGGAGAGAAATAGCTACTCCTGTTCAGTGGTCCACGAGGGT
CTGCACAATCACCACACGACTAAGAGCTTCTCCCGGACTCCGGGTAAGGG
CGGAGGTGGTGCAGGAGGCGGTGGAGACGTTGCCCTGACACAGACCCCCG
TGGCCCAGCCCGTGACCCTGGGCGACCAGGCCAGCATCAGCTGCAGGAGC
AGCCAGAGCTTGGTTCACAGCAACGGCAGGACCTACCTGGAGTGGTACCT
GCAGAAGCCGGGACAGAGCCCCCAGCTGCTGATCTACAAGGTGAGCAATA
GGTTCAGCGGCGTGCCCGACAGGTTCATAGGCAGTGGAAGCGGCAGCGAT
TTCACCCTGACCATTAGCAGGGTGGAGCCCGAGGACCTGGGAGTGTACTA
CTGCTTCCAGGCAACCCACGACCCCAACACCTTCGGCGCTGGAACTAAGC
TGGAGCTGAAGGGTGGCGGAGGATCTGGCGGAGGCGGTAGTGGCGGTGGC
GGATCTCAGGTGCAGCTCCAGCAGAGCGGTGCCGAGCTGGTTAAGCCCGG
TAGCAGCGTGAAGATCAGCTGCAAGGCCAGCGGCTACACCTTCACCAGCC
ACTTCATCCACTGGATCAAACAGCAGCCCGGCAACGGCCTGGAGTGGATC
GGCGGCATCTACCCCGGAGACGGCGACACCGAGTACAATCAGCAGTTCAA
CGGAAAGGCCACCCTGACCGCCGACAAGAGCAGCAGCACCGCCTACATGA
GGCTGAGCAGCCTGACCAGCGAGGACAGCGCCGTGTACTTCTGCGCCACC
AGGGTGCCCAGCTACTGGTTCTTCGACTTCTGGGGCCCTGGCACGATGGT
CACCGTGTCTTCTTAA

[0979] Full light chain nucleotide sequence of the LoSTIM, including leader sequence (SEQ ID NO: 28)

ATGGAATGGAGCTGGGTCTTTCTCTTCTTCCTGTCAGTAACGACTGGTGT
CCACTCCGACATCCTGCTGACCCAAAGCCCGGCAATCCTGAGCGTGAGGC
CCGGTGAGAGGGTGAGCTTCAGCTGCAGGGCCAGCCAGTCCCTGGGCACC
AGCATCCACTGGTATCAACAAAGGACCGACGGCAGCCCCAGGCTGCTGAT
CAAGTACGCCAGCGAGAGCATTAGCGGCATCCCCAGCAGGTTCAGCGGGA
GCGGCAGCGGCACCGACTTCACTCTGAGCATCAACAGCGTGGAGAGCGAG
GACATCGCCGACTACTACTGCCAGCAGAGCAACAGCTGGCCAATCACCTT
CGGCGCAGGCACCAAGCTGGAGCTGAAACGGGCAGATGCTGCACCAACTG
TATCCATCTTCCCACCATCCAGTGAGCAGTTAACATCTGGAGGTGCCTCA
GTCGTGTGCTTCTTGAACAACTTCTACCCCAAAGACATCAATGTCAAGTG
GAAGATTGATGGCAGTGAACGACAAAATGGCGTCCTGAACAGTTGGACTG
ATCAGGACAGCAAAGACAGCACCTACAGCATGAGCAGCACCCTCACGTTG
ACCAAGGACGAGTATGAACGACATAACAGCTATACCTGTGAGGCCACTCA
CAAGACATCAACTTCACCCATTGTCAAGAGCTTCAACAGGAATGAGTGTT
GATAA

[0980] The heavy chain and light chain nucleotide sequences were synthesized and cloned into the pLEV123 expression vector (LakePharma, Inc) and the sequence was confirmed by PCR amplification followed by Sanger sequencing. The vector was then amplified by PCR and the amplified DNA was run on an agarose gel for quality assessment and its sequence confirmed again by Sanger sequencing before proceeding to transfection. Protein production and purification was performed by LakePharma’s standard operating procedure. In brief, Chinese hamster ovary (CHO) cells were seeded in suspension in a shake flask and were expanded using serum-free chemically defined medium. On the day of transfection, the expanded cells were seeded into a new flask with fresh medium. The expression vector was transiently transfected into the CHO cells. The cells were maintained as a batch-fed culture for fourteen days. The conditioned media from the transient production run was harvested and clarified by centrifugation and filtration. The supernatant was loaded over a Protein A column pre-equilibrated with binding buffer. Washing buffer was passed through the column until the OD280 value (NanoDrop, Thermo Scientific) was measured to be zero. The target protein was eluted with a low pH buffer, fractions were collected, and the OD280 value of each fraction was recorded. Fractions containing the target protein were pooled and filtered through a 0.2 µm membrane filter. The protein concentration was calculated from the OD280 value and the calculated extinction coefficient. Capillary electrophoresis (CE-SDS) analysis of the target protein was performed using LabChip GXII (Perkin Elmer). To confirm a low endotoxin level, duplicate samples of the purified product were quantified using the chromogenic Limulus Amebocyte Lysate method (Endosafe-MCS, Charles River Laboratories).

### Binding Assays

[0981] Binding of the LoSTIM to PD-1 was assessed by flow cytometry using cells that express PD-1. 300-mPD-1 cells, transgenic mouse pro-B cells that stably express mouse PD-1, were exposed to serial dilutions of LoSTIM in phosphate-buffered saline with 0.5% bovine serum albumin (PBS-BSA) for 15 minutes at room temperature. They were then washed three times with PBS-BSA and incubated with a secondary antibody, anti-mouse IgG2a conjugated to phycoerythrin (anti-mouse IgG2a-PE) (Southern Biotech), for 10 minutes at 4° C. Cells were then washed three times with PBS-BSA. The cells were then analyzed by flow cytometry using an LSR Fortessa flow cytometer (Beckton Dickenson) and mean fluorescence intensity of PE was used as a metric of LoSTIM binding.

[0982] To confirm binding specificity, binding to activated primary T cells that express PD-1 was compared with binding to naive primary T cells that do not express PD-1. These T cells were obtained from a background that does not express H-2K^{b}, BALB/cByJ. These mice were obtained from the Jackson Laboratory (Bar Harbor, Maine) were sacrificed and a necropsy was performed to remove their spleens. Spleens were washed with sterile RPMI-1640 media (Thermo Fisher Scientific) with 10% fetal calf serum, penicillin, and streptomycin, hereafter referred to as complete media and then mechanically disaggregated in complete media to release splenocytes and filtered using a 40 micron sterile filter. Red blood cells were lysed by incubation in Red Hybri-Max Blood Cell Lysing Buffer (Millipore Sigma) for 5 minutes, followed by dilution and wash in complete media. The red blood cell lysis procedure was repeated one to two times until the cell pellet was white, indicating complete red blood cell lysis. Splenocytes were then counted and CD4 T cells were purified by negative magnetic selection using the CD4+ T Cell Isolation Kit (Miltenyi Biotech) according to its protocol. On the day prior to splenocyte harvest and T cell purification, a 10 cm tissue culture treated plate (Corning) was coated with anti-CD3 clone 17A2 (BioXCell) and the plate was incubated overnight at 4 degrees Celcius and then washed twice with PBS. After T cell purification, half of the purified T cells were activated by incubation in the anti-CD3 antibody-coated plate in the presence of soluble anti-CD28 clone 37.51 (BioXCell), and the other T cells were incubated in a plate that was not coated with antibody. After three days of incubation, both activated and rested naive T cells were washed with PBS-BSA and exposed to varying concentrations of LoSTIM in PBS-BSA for 15 minutes. Cells were then washed three times with PBS-BSA and incubated with anti-mouse-IgG2a-PE for 10 minutes at 4° C. Cells were washed three times in PBS-BSA and then analyzed by flow cytometry using an LSR Fortessa flow cytometer.

[0983] Binding to H-2Kb was assessed by flow cytometry using the C57BL/6 colorectal cancer cell line MC-38, which are known to express H-2Kb, and compared with binding to CT-26 cells, which are known not to express H-2Kb. Neither MC-38 nor CT-26 cells express PD-1. Cells were washed with PBS-BSA and exposed to varying concentrations of LoSTIM in PBS-BSA for 15 minutes. Cells were then washed three times with PBS-BSA and incubated with anti-mouse-IgG2a-PE for 10 minutes at 4° C. Cells were washed three times in PBS-BSA and then analyzed by flow cytometry using an LSR Fortessa flow cytometer.

[0984] Simultaneous bispecific binding to PD-1 and H-2K^{b} was assessed by flow cytometry using MC-38 cells, which express H-2K^{b} but not PD-1. MC-38 cells were washed with PBS-BSA and exposed to varying concentrations of LoSTIM in PBS-BSA for 15 minutes. Cells were then washed three times with PBS-BSA and incubated with Recombinant Mouse PD-1 Fc Chimera Protein (R&D Systems) bearing a human IgG1 Fc domain. Cells were washed three times with PBS-BSA and then incubated with anti-human-IgG1-PE adsorbed against mouse IgG (Southern Biotech) for 10 minutes at 4° C. Cells were washed three times in PBS-BSA and then analyzed by flow cytometry using an LSR Fortessa flow cytometer. In a separate experiment, simultaneous bispecific binding to PD-1 and H-2K^{b} was examined in an experimental setup where competition between monospecific and bispecific binding was allowed. In this experiment, MC-38 cells were similarly incubated with varying concentrations of LoSTIM in PBS-BSA but Recombinant Mouse PD-1 Fc Chimera Protein was added and allowed to incubate concurrently with the LoSTIM before cells were washed with PBS-BSA. Detection was similarly performed with mouse adsorbed anti-human-IgG-PE and cells were analyzed using an LSR Fortessa flow cytometer.

### T Cell Activation Assay

[0985] Bone marrow-derived dendritic cells (BMDDC) used as antigen presenting cells (APC) were prepared as follows. C57BL/6 or C3H mice obtained from the Jackson Laboratory were sacrificed and a necropsy was performed. Femurs and tibias were isolated and cleaned in 70% ethanol. After allowing the bones to dry, a scalpel was used to remove the ends of the bone and complete media was flushed through the bones using a syringe with a fine needle to remove the bone marrow. Bone marrow was then mechanically disaggregated by repeated aspiration with a syringe and then filtered using a 40 micron sterile filter. Red blood cells were lysed by incubation in Red Hybri-Max Blood Cell Lysing Buffer for 5 minutes, followed by dilution and wash in complete media. The red blood cell lysis procedure was repeated one to two times until the cell pellet was white, indicating complete red blood cell lysis. Bone marrow cells were counted and resuspended in complete media containing 20 ng/mL GM-CSF (Biolegend) and incubated at 37° C. in 5% CO2. After three days, an equivalent volume of complete media with 20 ng/mL GM-CSF was added. Three days later, half of the culture volume was removed, centrifuged, and resuspended in fresh complete media containing 20 ng/mL GM-CSF, returned to the culture, and incubated for an additional two days. A mix of suspension and loosely adherent BMDDC cells was obtained via repeat aspiration using a pippete.

[0986] Purified B-cells were used as APCs in some experiments and were prepared as follows. C57BL/6 or C3H mice were obtained from the Jackson Laboratory, sacrificed, and a necropsy was performed to remove their spleens. Spleens were washed with complete media and then mechanically disaggregated in complete media to release splenocytes and filtered using a 40 micron sterile filter. Red blood cells were lysed by incubation in Red Hybri-Max Blood Cell Lysing Buffer for 5 minutes, followed by dilution and wash in complete media. The red blood cell lysis procedure was repeated one to two times until the cell pellet was white, indicating complete red blood cell lysis. Splenocytes were then counted and B-cells were purified by negative magnetic selection using the Pan B Cell Isolation Kit II (Miltenyi Biotech) according to its protocol.

[0987] To obtain naive T cells, BALB/cByJ mice were sacrificed and a necropsy was performed to remove their spleens. Spleens were washed with sterile RPMI-1640 media (Thermo Fisher Scientific) with complete media and then mechanically disaggregated in complete media to release splenocytes. Red blood cells were lysed by incubation in Red Hybri-Max Blood Cell Lysing Buffer for 5 minutes, followed by dilution and wash in complete media. The red blood cell lysis procedure was repeated one to two times until the cell pellet was white, indicating complete red blood cell lysis. Splenocytes were then counted and CD8 T cells were purified by negative magnetic selection using either the CD8+ T Cell Isolation Kit or CD4+ T Cell Isolation Kit (Miltenyi Biotech) according to their respective protocols.

[0988] To assess the effect of the LoSTIM on naive T cell activation by APCs, naive BALB/cByJ T cells were co-cultured with either BMDDC or B-cell APCs at a 1:1 ratio for five days. The effect of the LoSTIM on T cells primed by APCs obtained from C57BL/6 mice, which express H-2Kb and therefore bind the LoSTIM, was compared with its effect on T cells primed by APCs obtained from C3H mice, which do not express H-2Kb and therefore do not bind the LoSTIM. The detailed method was as follows. Naive BALB/cByJ T cells were obtained as described above and labeled with carboxyfluorescein succinimidyl ester (CFSE) using the CellTrace CFSE Cell Proliferation Kit (Thermo Fisher Scientific) according to its protocol. BMDDC or B-cells obtained from either C57BL/6 or C3H mice were obtained as described above and labeled with CellTrace Violet dye using CellTrace Violet Cell Proliferation Kit (Thermo Fisher Scientific) according to its protocol. 1×10⁵ T cells and 1×10⁵ APCs were then co-cultured in 200 microliters of complete media in a 96-well tissue culture plate. At least four replicate cultures were included for each condition. Treatment conditions included varying concentrations of LoSTIM (between 50 nanomolar and 500 nanomolar), parent anti-PD-1 clone 1A12 monoclonal antibody as a negative control, parent anti-H-2K^{b} clone AF6-88.5.3 monoclonal antibody as a negative control, or PBS as a vehicle control. 10 ug/mL of purified rat anti-mouse CD16/CD32 clone 2.4G2 was added to each culture to ensure that any binding of the LoSTIM or the control antibodies to the APCs reflected only H-2K^{b}-specific binding and not Fcγ receptor binding. After five days of incubation at 37° C. in an atmosphere of 5% CO2, cells were analyzed by flow cytometry using an LSR Fortessa flow cytometer. The percentage of T cells undergoing cell division was determined by calculating the percentage of CellTrace Violet negative cells with CFSE dilution and this was used as a metric of T cell activation.

### Signaling Assay

[0989] To assess the effect on T cell receptor (TCR) signaling, CD8+ T cells expressing a transgenic TCR that recognizes the ovalbumin antigen SIINFEKL (SEQ ID NO: 29) were purified from OT-1 mice, activated, and then restimulated by C57BL/6 B-cells cells loaded with SIINFEKL antigen in the presence or absence of LoSTIM. TCR activation was assessed by phosphoflow cytometry. The detailed method was as follows. OT-1 mice were obtained from the Jackson Laboratory (Bar Harbor, Maine) and sacrificed. A necropsy was performed to remove their spleens. Spleens were washed with complete media and then mechanically disaggregated in complete media to release splenocytes. Red blood cells were lysed by incubation in Red Hybri-Max Blood Cell Lysing Buffer for 5 minutes, followed by dilution and wash in complete media. The red blood cell lysis procedure was repeated one to two times until the cell pellet was white, indicating complete red blood cell lysis. Splenocytes were then counted and CD8 T cells were purified by negative magnetic selection using the CD8+ T Cell Isolation Kit (Miltenyi Biotech) according to its protocol. On the day prior to splenocyte harvest and T cell purification, a 10 cm tissue culture treated plate (Corning) was coated with anti-CD3 clone 17A2 (BioXCell) and the plate was incubated overnight at 4° C.elcius and then washed twice with PBS. Purified T cells were activated by incubation in the anti-CD3 antibody-coated plate in the presence of soluble anti-CD28 clone 37.51 at 37° C. for three days. Activated T cells were then removed from the plate, washed in complete media, and then rested in a tissue culture plate without antibody stimulation for six hours. Concurrently, fresh C57BL/6 B-cells, purified as described above, were pulsed with 10 micromolar of SIINFEKL peptide for 6 hours, washed three times, and then co-cultured in a 96 well round bottom plate (Corning) with rested T cells. Before incubation, the plate was centrifuged for one minute at 1250 rpm to bring the T cells and B cells in to close proximity. Cocultures were incubated at 37° C. and 5% CO2. Cells were fixed and permeabilized using the eBioscience Intracellular Fixation and Permeabilization Buffer Set according to the published kit protocol. Cells were stained at the appropriate points in the kit protocol with anti-phospho-ZAP70 (clone n3kobu5) conjugated to PE (Thermo Fisher Scientific) as well as anti-mouse CD8 (clone 53-6.7) conjugated to APC (Biolegend). Cells were analyzed by flow cytometry using an LSR Fortessa flow cytometer and the mean fluorescence intensity of PE within the CD8 positive population was used as a metric of TCR activation.

### In Vivo Inhibition of Allorei Ection

[0990] 1×10⁶ MC38 cells (of C57BL/6 origin) were injected subcutaneously into the flank of ten BALB/cByJ mice at day zero and mice were divided in to two groups: a treatment group of five mice receiving LoSTIM and a control group of five mice receiving vehicle control (PBS). Beginning on day zero, mice in each group were injected intraperitoneally with either 200 µg of LoSTIM in 200 µL of PBS or 200 µL of PBS alone. These intraperitoneal injections were continued every three days. Tumor size was measured every three days with calipers in three dimensions.

### In Vivo Treatment of Syngeneic Tumor

[0991] 2×10⁵ CT-26 cells were injected subcutaneously into the abdomen of BALB/cByJ mice at day 0. Tumor size was measured on day six and mice with measurable tumor were divided in three groups: a treatment group of five mice receiving LoSTIM, a control group of five mice receiving the anti-PD-1 parent antibody 29F.1A12, and a group of four mice receiving vehicle control (PBS). Beginning on day six, 200 µg of LoSTIM in 200 µL of PBS, 200 µg of 29F.1A12 in 200 µL of PBS, or 200 µL of PBS alone was injected intraperitoneally. These intraperitoneal injections were continued every three days. Mice were sacrificed when either the tumor size reached the predefined limit set by an IACUC-approved protocol or tumors became ulcerated. Tumor size was measured every three days with calipers in three dimensions until the first mouse was sacrificed.

### SE-UPLC Analysis and Preparative Size Exclusion Chromatography

[0992] For size exclusion ultra-performance liquid chromatography (SE-UPLC) analysis, 2 microliters of sample was injected into an ACQUITY UPLC Protein BEH SEC 200 with a 1.7 micrometer, 4.6 x 150 mm column with a flow of 0.3 mL/min for 10 minutes. A mobile phase of 50 mM sodium phosphate and 500 mM sodium chloride at pH 6.2 was used.

[0993] For preparative size exclusion chromatography, material was loaded on to a HiLoad 26/600 Superdex 200 column, which was run with a mobile phase of phosphate buffered saline at pH 7.4. Elution of protein was detected by measuring absorbance of UV light at 280 nm. Three peaks were detected, representing the three molecular species identified by SE-UPLC analysis. Elution fractions corresponding to these peaks were collected and pooled appropriately to yield three separate preparations, each corresponding to one of the three molecular species.

### Incorporation by Reference

[0994] All publications, patents, and patent applications mentioned herein are hereby incorporated by reference in their entirety as if each individual publication, patent or patent application was specifically and individually indicated to be incorporated by reference. In case of conflict, the present application, including any definitions herein, will control.

### Equivalents

[0995] Those skilled in the art will recognize, or be able to ascertain using no more than routine experimentation, many equivalents to the specific embodiments of the invention described herein. Such equivalents are intended to be encompassed by the following claims.

What is claimed is:

1. A bispecific molecule comprising a first part that specifically binds to PD-1 and a second part that specifically binds to a surface antigen of a target cell other than a T cell, wherein simultaneous binding of the bispecific molecule to the surface antigen and to PD-1 facilitates clustering of PD-1 in proximity to an immunological synapse and/or wherein simultaneous binding of the bispecific molecule to the surface antigen and to PD-1 reduces or prevents T cell activity, and/or toxicity directed to the target cell, optionally wherein
i) the bispecific molecule binds to PD-1 on a T cell;
ii) T cell activity is cytokine production and/or T cell proliferation;
iii) at least the first part or the second part comprises a monoclonal or polyclonal antibody, or an antigen-biding fragment thereof;
iv) the bispecific molecule has a single binding site for PD-1; and/or
v) the bispecific molecule has a single binding site for PD-1 and a single binding site for the surface antigen.

2. The bispecific molecule of claim 1, wherein i) the difference in the K_{d} of binding to PD-1 and the K_{d} of binding to the tissue-specific surface antigen is at least 10-fold, 50-fold, 100-fold, 500-fold, 1,000-fold, 5,000-fold, or 10,000-fold, optionally further wherein the K_{d} of binding to PD-1 is less than the K_{d} of binding to the tissue-specific surface antigen and/or ii) the difference in the off-rate when binding to PD-1 and the off-rate when binding to the tissue-specific surface antigen is at least 10-fold, 50-fold, 100-fold, 500-fold, 1,000 fold, 5,000-fold, or 10,000-fold, optionally further wherein the off-rate of binding to PD-1 is slower than the off-rate of binding to the tissue-specific surface antigen.

3. The bispecific molecule of claim 1 or 2, wherein the first part specifically binds to PD-1 at a site different from the PD-L1 binding site of PD-1.

4. The bispecific molecule of any one of claims 1 to 3, wherein the first part blocks binding of neither PD-L1 nor PD-L2 to PD-1.

5. The bispecific molecule of claim 3 or 4, wherein the bispecific molecule acts as an agonist of PD-1 at a cell or tissue expressing the surface antigen, but not at a cell or tissue not expressing the surface antigen.

6. The bispecific molecule of claim 1 or 2, wherein the first part i) specifically binds to PD-1 and blocks the binding of PD-1 with PD-L1 or PD-L2 and/or ii) specifically binds to PD-1 at the PD-L1 and/or PD-L2 binding site of PD-1.

7. The bispecific molecule of claim 5 or 6, wherein the bispecific molecule acts as an agonist of PD-1 at a cell or tissue expressing the surface antigen, and acts as an antagonist of PD-1 at a cell or tissue not expressing the surface antigen.

8. The bispecific molecule of claim 1 or 2, wherein the first part comprises an amino acid sequence having at least 60%, 65%, 70%, 75%, 80%, 85%, 90%, or 95% sequence identity with an amino acid sequence selected from the group consisting of sequences listed in Table 1, Table 4A, and Table 4B, optionally wherein the sequence is SEQ ID NO: 30.

9. The bispecific molecule of claim 1, 2, or 8, wherein the first part comprises an amino acid sequence having at least 60%, 65%, 70%, 75%, 80%, 85%, 90%, or 95% sequence identity with SEQ ID NO: 31.

10. The bispecific molecule of claim 1 or 2, wherein the first part comprises an amino acid sequence having at least 60%, 65%, 70%, 75%, 80%, 85%, 90%, or 95% sequence identity with an extracellular domain of PD-L1 or PD-L2, optionally wherein the target is a receptor for the extracellular domain and/or the extracellular domain of PD-L1 has the sequence of SEQ ID NO: 24.

11. The bispecific molecule of claim 1 or 2, wherein the surface antigen is selected from the group of surface antigens listed in Table 3A, Table 3B, and Table 3C, or an MHC class I allele and/or an MHC class II allele, optionally wherein the allele is an HLA allele or wherein the MHC allele is H-2Kb.

12. The bispecific molecule of claim 11, wherein the second part comprises an amino acid sequence having at least 60%, 65%, 70%, 75%, 80%, 85%, 90%, or 95% sequence identity with SEQ ID NO: 21.

13. The bispecific molecule of claim 11 or 12, wherein the second part comprises an amino acid sequence having at least 60%, 65%, 70%, 75%, 80%, 85%, 90%, or 95% sequence identity with SEQ ID NO: 22.

14. The bispecific molecule of claim 1 or 2, wherein the bispecific molecule comprises an amino acid sequence having at least 60%, 65%, 70%, 75%, 80%, 85%, 90%, or 95% sequence identity with any one of SEQ ID NOs: 1, 2, 3, 4, 5, 6, 7, 8, 9, 10, 11, 12, 13, and 14.

15. The bispecific molecule of any one of claims 1-14, wherein at least the first part or the second part is a chimeric, humanized, composite, murine, or human monoclonal or polyclonal antibody, or antigen-binding fragment thereof.

16. The bispecific molecule of any one of claims 1-15, wherein at least the first part or the second part is detectably labeled, comprises an effector domain, comprises an Fc domain, and/or is selected from the group consisting of Fv, Fav, F(ab′)2), Fab′, dsFv, scFv, sc(Fv)2, and diabodies fragments, optionally wherein the Fc domain is modified to decrease binding to Fc gamma receptor.

17. An isolated nucleic acid molecule that encodes a bispecific molecule of any one of claims 1-16, optionally wherein the isolated nucleic acid molecule hybridizes, under stringent conditions, with the complement of a nucleic acid encoding a polypeptide selected from the group consisting of the sequences of SEQ ID NOs: 1-14, 21-26, 28, and 30-31, or a sequence with at least about 95% homology to a nucleic acid encoding a polypeptide selected from the group consisting of the sequences of SEQ ID NOs: 1-14, 21-26, 28, and 30-31, optionally wherein the isolated nucleic acid molecule is a stabilized mRNA.

18. A vector comprising the isolated nucleic acid of claim 17.

19. A host cell which comprises the isolated nucleic acid of claim 17, comprises the vector of claim 18, or expresses the bispecific molecule of any one of claims 1-16, optionally wherein the host cell is genomically engineered and/or is a T cell that expresses a heterologous protein such as a chimeric antigen receptor (CAR).

20. A device or kit comprising at least one bispecific molecule according to any one of claims 1-16, said device or kit optionally comprising a label to detect the at least one bispecific molecule or a complex comprising the bispecific molecule.

21. A method of producing at least one bispecific molecule according to any one of claims 1-16, which method comprises the steps of: (i) culturing a transformed host cell which has been transformed by a nucleic acid comprising a sequence encoding at least one bispecific molecule according to any one of claims 1-16 under conditions suitable to allow expression of said bispecific molecule; and (ii) recovering the expressed bispecific molecule.

22. A method of inhibiting activation of T cells in a cell-specific and/or tissue-specific manner in a sample, comprising contacting the sample with the bispecific molecule of any one of claims 1-16.

23. The method of claim 22, wherein the bispecific molecule inhibits activation of T cells interacting with the target cell when the bispecific molecule simulataneously binds to the surface antigen and to PD-1.

24. A method of inhibiting activation of T cells in a cell-specific and/or tissue-specific manner in a subject, comprising administering to the subject the bispecific molecule of any one of claims 1-16, optionally wherein the subject is at risk of, suspected of having, or afflicted with a cancer.

25. The method of claim 24, wherein the bispecific molecule inhibits activation of T cells interacting with the target cell when the bispecific molecule simulataneously binds to the surface antigen and to PD-1.

26. The method of claim 25, wherein the subject is set to receive or has received solid organ transplantation.

27. The method of claim 26, wherein the surface antigen is a mismatched MHC class I or class II.

28. The method of claim 25, wherein the subject is at risk of, suspected of having, or afflicted with an autoimmune disease to thereby treat the autoimmune disease.

29. The method of claim 28, wherein the surface antigen is one that is expressed on pathologically inflamed tissue.

30. The method of claim 25, wherein the subject is at risk of, suspected of having, or afflicted with graft-versus-host disease (GVHD) to thereby treat the GVHD.

31. The method of claim 30, wherein the surface antigen is one that is expressed on inflamed tissue but not on cancerous cells and/or the subject is set to receive or has received an allogeneic bone marrow transplantation.

32. The method of claim 25, wherein the subject is at risk of, suspected of having, or afflited with checkpoint-inhibitor immune related adverse events (irAE) to thereby treat the irAE.

33. The method of claim 32, wherein the surface antigen is one that is expressed on inflamed tissue but not on cancerous cells.

34. The method of claim 25, wherein the subject is set to receive or has received an engineered immune cell therapy.

35. The method of claim 34, wherein the surface antigen is one that is expressed in normal tissues that also express a tumor-associated antigen targeted by the immune cell therapy, but is one that is not expressed on cancerous cells.

The application's sequence listing, which the Patent Office published only in electronic form, follows.

SEQUENCE LISTING (333 sequences)

SEQ ID NO: 1 - protein, 474 aa, Artificial Sequence
  Description of Artificial Sequence: Synthetic polypeptide
FTITAPKDLYVVEYGSNVTMECRFPVERELDLLALVVYWEKEDEQVIQFVAGEEDLKPQHSNFRGRASLPKDQLLKGNAALQITDVKLQDAGVYCCIISYGGADYKRITLKVNAPYRKINQRISVDPATSEHELICQAEGYPEAEVIWTNSDHQPVSGKRSVTTSRTEGMLLNVTSSLRVNATANDVFYCTFWRSQPGQNHTAELIIPELPATHPPQNRTHGGGGAGGGGEVQVVETGGGLVQPGSSLKLSCESSGFTFSSTWMNWVRQAPGKGLEWVALVKDKYSNYEANYAESVKGRFIISRDDSKNRVYLQMNTLRDQDTATYHCTRSRGYKNWYFDFWGPGTMVTVSSGGGGSGGGGSGGGGSDIQMTQSPPSLSASLGDKVTITCQASQNINNYIAWYQQKPGKAPGLLILYTSTLVSGTPSRFSGSGSGRDYSFSISNVESEDIASYYCLQYDNSPRTFGGGTKLELK

SEQ ID NO: 2 - protein, 682 aa, Artificial Sequence
  Description of Artificial Sequence: Synthetic polypeptide
FTITAPKDLYVVEYGSNVTMECRFPVERELDLLALVVYWEKEDEQVIQFVAGEEDLKPQHSNFRGRASLPKDQLLKGNAALQITDVKLQDAGVYCCIISYGGADYKRITLKVNAPYRKINQRISVDPATSEHELICQAEGYPEAEVIWTNSDHQPVSGKRSVTTSRTEGMLLNVTSSLRVNATANDVFYCTFWRSQPGQNHTAELIIPELPATHPPQNRTHGGGGAGGGGEVQVVETGGGLVQPGSSLKLSCESSGFTFSSTWMNWVRQAPGKGLEWVALVKDKYSNYEANYAESVKGRFIISRDDSKNRVYLQMNTLRDQDTATYHCTRSRGYKNWYFDFWGPGTMVTVSSAKTTAPSVYPLAPVCGDTTGSSVTLGCLVKGYFPEPVTLTWNSGSLSSGVHTFPAVLQSDLYTLSSSVTVTSSTWPSQSITCNVAHPASSTKVDKKIEPRGPTIKPCPPCKCPAPNLEGGPSVFIFPPKIKDVLMISLSPIVTCVVVDVSEDDPDVQISWFVNNVEVHTAQTQTHREDYNSTLRVVSALPIQHQDWMSGKAFACAVNNKDLPAPIERTISKPKGSVRAPQVYVLPPPEEEMTKKQVTLTCMVTDFMPEDIYVEWTNNGKTELNYKNTEPVLDSDGSYFMYSKLRVEKKNWVERNSYSCSVVHEGLHNHHTTKSFSRTPGK

SEQ ID NO: 3 - protein, 214 aa, Artificial Sequence
  Description of Artificial Sequence: Synthetic polypeptide
DIQMTQSPPSLSASLGDKVTITCQASQNINNYIAWYQQKPGKAPGLLILYTSTLVSGTPSRFSGSGSGRDYSFSISNVESEDIASYYCLQYDNSPRTFGGGTKLELKRADAAPTVSIFPPSSEQLTSGGASVVCFLNNFYPKDINVKWKIDGSERQNGVLNSWTDQDSKDSTYSMSSTLTLTKDEYERHNSYTCEATHKTSTSPIVKSFNRNEC

SEQ ID NO: 4 - protein, 707 aa, Artificial Sequence
  Description of Artificial Sequence: Synthetic polypeptide
DVALTQTPVAQPVTLGDQASISCRSSQSLVHSNGRTYLEWYLQKPGQSPQLLIYKVSNRFSGVPDRFIGSGSGSDFTLTISRVEPEDLGVYYCFQATHDPNTFGAGTKLELKGGGGSGGGGSGGGGSQVQLQQSGAELVKPGSSVKISCKASGYTFTSHFIHWIKQQPGNGLEWIGGIYPGDGDTEYNQQFNGKATLTADKSSSTAYMRLSSLTSEDSAVYFCATRVPSYWFFDFWGPGTMVTVSSGGGGAGGGGEVQVVETGGGLVQPGSSLKLSCESSGFTFSSTWMNWVRQAPGKGLEWVALVKDKYSNYEANYAESVKGRFIISRDDSKNRVYLQMNTLRDQDTATYHCTRSRGYKNWYFDFWGPGTMVTVSSAKTTAPSVYPLAPVCGDTTGSSVTLGCLVKGYFPEPVTLTWNSGSLSSGVHTFPAVLQSDLYTLSSSVTVTSSTWPSQSITCNVAHPASSTKVDKKIEPRGPTIKPCPPCKCPAPNLEGGPSVFIFPPKIKDVLMISLSPIVTCVVVDVSEDDPDVQISWFVNNVEVHTAQTQTHREDYNSTLRVVSALPIQHQDWMSGKAFACAVNNKDLPAPIERTISKPKGSVRAPQVYVLPPPEEEMTKKQVTLTCMVTDFMPEDIYVEWTNNGKTELNYKNTEPVLDSDGSYFMYSKLRVEKKNWVERNSYSCSVVHEGLHNHHTTKSFSRTPGK

SEQ ID NO: 5 - protein, 214 aa, Artificial Sequence; identical to SEQ ID NO: 3
  Description of Artificial Sequence: Synthetic polypeptide

SEQ ID NO: 6 - protein, 707 aa, Artificial Sequence
  Description of Artificial Sequence: Synthetic polypeptide
EVQVVETGGGLVQPGSSLKLSCESSGFTFSSTWMNWVRQAPGKGLEWVALVKDKYSNYEANYAESVKGRFIISRDDSKNRVYLQMNTLRDQDTATYHCTRSRGYKNWYFDFWGPGTMVTVSSAKTTAPSVYPLAPVCGDTTGSSVTLGCLVKGYFPEPVTLTWNSGSLSSGVHTFPAVLQSDLYTLSSSVTVTSSTWPSQSITCNVAHPASSTKVDKKIEPRGPTIKPCPPCKCPAPNLEGGPSVFIFPPKIKDVLMISLSPIVTCVVVDVSEDDPDVQISWFVNNVEVHTAQTQTHREDYNSTLRVVSALPIQHQDWMSGKAFACAVNNKDLPAPIERTISKPKGSVRAPQVYVLPPPEEEMTKKQVTLTCMVTDFMPEDIYVEWTNNGKTELNYKNTEPVLDSDGSYFMYSKLRVEKKNWVERNSYSCSVVHEGLHNHHTTKSFSRTPGKGGGGAGGGGDVALTQTPVAQPVTLGDQASISCRSSQSLVHSNGRTYLEWYLQKPGQSPQLLIYKVSNRFSGVPDRFIGSGSGSDFTLTISRVEPEDLGVYYCFQATHDPNTFGAGTKLELKGGGGSGGGGSGGGGSQVQLQQSGAELVKPGSSVKISCKASGYTFTSHFIHWIKQQPGNGLEWIGGIYPGDGDTEYNQQFNGKATLTADKSSSTAYMRLSSLTSEDSAVYFCATRVPSYWFFDFWGPGTMVTVSS

SEQ ID NO: 7 - protein, 214 aa, Artificial Sequence; identical to SEQ ID NO: 3
  Description of Artificial Sequence: Synthetic polypeptide

SEQ ID NO: 8 - protein, 469 aa, Artificial Sequence
  Description of Artificial Sequence: Synthetic polypeptide
FTITAPKDLYVVEYGSNVTMECRFPVERELDLLALVVYWEKEDEQVIQFVAGEEDLKPQHSNFRGRASLPKDQLLKGNAALQITDVKLQDAGVYCCIISYGGADYKRITLKVNAPYRKINQRISVDPATSEHELICQAEGYPEAEVIWTNSDHQPVSGKRSVTTSRTEGMLLNVTSSLRVNATANDVFYCTFWRSQPGQNHTAELIIPELPATHPPQNRTHGGGGAGGGGDVQLVESGGGLVQPGGSRKLSCAASGFTFSSFGMHWVRQAPEKGLEWVAYISSGSNTIYYADTVKGRFTISRDNPKNTLFLQMTSLRSEDTAMYYCALTTGSWFAYWGQGTLVTVSAGGGGSGGGGSGGGGSDILLTQSPAILSVRPGERVSFSCRASQSLGTSIHWYQQRTDGSPRLLIKYASESISGIPSRFSGSGSGTDFTLSINSVESEDIADYYCQQSNSWPITFGAGTKLELK

SEQ ID NO: 9 - protein, 677 aa, Artificial Sequence
  Description of Artificial Sequence: Synthetic polypeptide
FTITAPKDLYVVEYGSNVTMECRFPVERELDLLALVVYWEKEDEQVIQFVAGEEDLKPQHSNFRGRASLPKDQLLKGNAALQITDVKLQDAGVYCCIISYGGADYKRITLKVNAPYRKINQRISVDPATSEHELICQAEGYPEAEVIWTNSDHQPVSGKRSVTTSRTEGMLLNVTSSLRVNATANDVFYCTFWRSQPGQNHTAELIIPELPATHPPQNRTHGGGGAGGGGDVQLVESGGGLVQPGGSRKLSCAASGFTFSSFGMHWVRQAPEKGLEWVAYISSGSNTIYYADTVKGRFTISRDNPKNTLFLQMTSLRSEDTAMYYCALTTGSWFAYWGQGTLVTVSAAKTTAPSVYPLAPVCGDTTGSSVTLGCLVKGYFPEPVTLTWNSGSLSSGVHTFPAVLQSDLYTLSSSVTVTSSTWPSQSITCNVAHPASSTKVDKKIEPRGPTIKPCPPCKCPAPNLEGGPSVFIFPPKIKDVLMISLSPIVTCVVVDVSEDDPDVQISWFVNNVEVHTAQTQTHREDYNSTLRVVSALPIQHQDWMSGKAFACAVNNKDLPAPIERTISKPKGSVRAPQVYVLPPPEEEMTKKQVTLTCMVTDFMPEDIYVEWTNNGKTELNYKNTEPVLDSDGSYFMYSKLRVEKKNWVERNSYSCSVVHEGLHNHHTTKSFSRTPGK

SEQ ID NO: 10 - protein, 214 aa, Artificial Sequence
  Description of Artificial Sequence: Synthetic polypeptide
DILLTQSPAILSVRPGERVSFSCRASQSLGTSIHWYQQRTDGSPRLLIKYASESISGIPSRFSGSGSGTDFTLSINSVESEDIADYYCQQSNSWPITFGAGTKLELKRADAAPTVSIFPPSSEQLTSGGASVVCFLNNFYPKDINVKWKIDGSERQNGVLNSWTDQDSKDSTYSMSSTLTLTKDEYERHNSYTCEATHKTSTSPIVKSFNRNEC

SEQ ID NO: 11 - protein, 702 aa, Artificial Sequence
  Description of Artificial Sequence: Synthetic polypeptide
DVALTQTPVAQPVTLGDQASISCRSSQSLVHSNGRTYLEWYLQKPGQSPQLLIYKVSNRFSGVPDRFIGSGSGSDFTLTISRVEPEDLGVYYCFQATHDPNTFGAGTKLELKGGGGSGGGGSGGGGSQVQLQQSGAELVKPGSSVKISCKASGYTFTSHFIHWIKQQPGNGLEWIGGIYPGDGDTEYNQQFNGKATLTADKSSSTAYMRLSSLTSEDSAVYFCATRVPSYWFFDFWGPGTMVTVSSGGGGAGGGGDVQLVESGGGLVQPGGSRKLSCAASGFTFSSFGMHWVRQAPEKGLEWVAYISSGSNTIYYADTVKGRFTISRDNPKNTLFLQMTSLRSEDTAMYYCALTTGSWFAYWGQGTLVTVSAAKTTAPSVYPLAPVCGDTTGSSVTLGCLVKGYFPEPVTLTWNSGSLSSGVHTFPAVLQSDLYTLSSSVTVTSSTWPSQSITCNVAHPASSTKVDKKIEPRGPTIKPCPPCKCPAPNLEGGPSVFIFPPKIKDVLMISLSPIVTCVVVDVSEDDPDVQISWFVNNVEVHTAQTQTHREDYNSTLRVVSALPIQHQDWMSGKAFACAVNNKDLPAPIERTISKPKGSVRAPQVYVLPPPEEEMTKKQVTLTCMVTDFMPEDIYVEWTNNGKTELNYKNTEPVLDSDGSYFMYSKLRVEKKNWVERNSYSCSVVHEGLHNHHTTKSFSRTPGK

SEQ ID NO: 12 - protein, 214 aa, Artificial Sequence; identical to SEQ ID NO: 10
  Description of Artificial Sequence: Synthetic polypeptide

SEQ ID NO: 13 - protein, 702 aa, Artificial Sequence
  Description of Artificial Sequence: Synthetic polypeptide
DVQLVESGGGLVQPGGSRKLSCAASGFTFSSFGMHWVRQAPEKGLEWVAYISSGSNTIYYADTVKGRFTISRDNPKNTLFLQMTSLRSEDTAMYYCALTTGSWFAYWGQGTLVTVSAAKTTAPSVYPLAPVCGDTTGSSVTLGCLVKGYFPEPVTLTWNSGSLSSGVHTFPAVLQSDLYTLSSSVTVTSSTWPSQSITCNVAHPASSTKVDKKIEPRGPTIKPCPPCKCPAPNLEGGPSVFIFPPKIKDVLMISLSPIVTCVVVDVSEDDPDVQISWFVNNVEVHTAQTQTHREDYNSTLRVVSALPIQHQDWMSGKAFACAVNNKDLPAPIERTISKPKGSVRAPQVYVLPPPEEEMTKKQVTLTCMVTDFMPEDIYVEWTNNGKTELNYKNTEPVLDSDGSYFMYSKLRVEKKNWVERNSYSCSVVHEGLHNHHTTKSFSRTPGKGGGGAGGGGDVALTQTPVAQPVTLGDQASISCRSSQSLVHSNGRTYLEWYLQKPGQSPQLLIYKVSNRFSGVPDRFIGSGSGSDFTLTISRVEPEDLGVYYCFQATHDPNTFGAGTKLELKGGGGSGGGGSGGGGSQVQLQQSGAELVKPGSSVKISCKASGYTFTSHFIHWIKQQPGNGLEWIGGIYPGDGDTEYNQQFNGKATLTADKSSSTAYMRLSSLTSEDSAVYFCATRVPSYWFFDFWGPGTMVTVSS

SEQ ID NO: 14 - protein, 214 aa, Artificial Sequence; identical to SEQ ID NO: 10
  Description of Artificial Sequence: Synthetic polypeptide

SEQ ID NO: 15 - protein, 4 aa, Unknown
  Description of Unknown: Malaria peptide
NANP

SEQ ID NO: 16 - protein, 9 aa, Artificial Sequence
  Description of Artificial Sequence: Synthetic peptide
GGGGAGGGG

SEQ ID NO: 17 - protein, 15 aa, Artificial Sequence
  Description of Artificial Sequence: Synthetic peptide
GGGGSGGGGSGGGGS

SEQ ID NO: 18 - protein, 19 aa, Artificial Sequence
  Description of Artificial Sequence: Synthetic peptide
MEWSWVFLFFLSVTTGVHS

SEQ ID NO: 19 - DNA, 351 bp, Artificial Sequence
  Description of Artificial Sequence: Synthetic polynucleotide
gatgtgcagctggtggagtctgggggaggcttagtgcagcctggagggtcccggaaactctcctgtgcagcctctggattcactttcagtagctttggaatgcactgggttcgtcaggctccagagaaggggctggagtgggtcgcatacattagtagtggcagtaataccatctactatgcagacacagtgaagggccgattcaccatctccagagacaatcccaagaacaccctgttcctgcaaatgaccagtctaaggtctgaggacacggccatgtattattgtgcacttacgacggggtcctggtttgcttactggggccaagggactctggtcactgtctctgca

SEQ ID NO: 20 - DNA, 321 bp, Artificial Sequence
  Description of Artificial Sequence: Synthetic polynucleotide
gacatcttgctgactcagtctccagccatcctgtctgtgcgtccaggagaaagagtcagtttctcctgcagggccagtcagagccttggcacaagcatacactggtatcagcaaagaacagatggttctccaaggcttctcataaaatatgcttctgagtctatctctgggatcccttccaggtttagtggcagtggatcagggacagattttactcttagcatcaacagtgtggagtctgaagatattgcagattattactgtcaacaaagtaatagctggccaatcacgttcggtgctgggaccaagctggagctgaaa

SEQ ID NO: 21 - protein, 117 aa, Artificial Sequence
  Description of Artificial Sequence: Synthetic polypeptide
DVQLVESGGGLVQPGGSRKLSCAASGFTFSSFGMHWVRQAPEKGLEWVAYISSGSNTIYYADTVKGRFTISRDNPKNTLFLQMTSLRSEDTAMYYCALTTGSWFAYWGQGTLVTVSA

SEQ ID NO: 22 - protein, 107 aa, Artificial Sequence
  Description of Artificial Sequence: Synthetic polypeptide
DILLTQSPAILSVRPGERVSFSCRASQSLGTSIHWYQQRTDGSPRLLIKYASESISGIPSRFSGSGSGTDFTLSINSVESEDIADYYCQQSNSWPITFGAGTKLELK

SEQ ID NO: 23 - protein, 330 aa, Artificial Sequence
  Description of Artificial Sequence: Synthetic polypeptide
AKTTAPSVYPLAPVCGDTTGSSVTLGCLVKGYFPEPVTLTWNSGSLSSGVHTFPAVLQSDLYTLSSSVTVTSSTWPSQSITCNVAHPASSTKVDKKIEPRGPTIKPCPPCKCPAPNLEGGPSVFIFPPKIKDVLMISLSPIVTCVVVDVSEDDPDVQISWFVNNVEVHTAQTQTHREDYNSTLRVVSALPIQHQDWMSGKAFACAVNNKDLPAPIERTISKPKGSVRAPQVYVLPPPEEEMTKKQVTLTCMVTDFMPEDIYVEWTNNGKTELNYKNTEPVLDSDGSYFMYSKLRVEKKNWVERNSYSCSVVHEGLHNHHTTKSFSRTPGK

SEQ ID NO: 24 - protein, 246 aa, Artificial Sequence
  Description of Artificial Sequence: Synthetic polypeptide
DVALTQTPVAQPVTLGDQASISCRSSQSLVHSNGRTYLEWYLQKPGQSPQLLIYKVSNRFSGVPDRFIGSGSGSDFTLTISRVEPEDLGVYYCFQATHDPNTFGAGTKLELKGGGGSGGGGSGGGGSQVQLQQSGAELVKPGSSVKISCKASGYTFTSHFIHWIKQQPGNGLEWIGGIYPGDGDTEYNQQFNGKATLTADKSSSTAYMRLSSLTSEDSAVYFCATRVPSYWFFDFWGPGTMVTVSS

SEQ ID NO: 25 - protein, 721 aa, Artificial Sequence
  Description of Artificial Sequence: Synthetic polypeptide
MEWSWVFLFFLSVTTGVHSDVQLVESGGGLVQPGGSRKLSCAASGFTFSSFGMHWVRQAPEKGLEWVAYISSGSNTIYYADTVKGRFTISRDNPKNTLFLQMTSLRSEDTAMYYCALTTGSWFAYWGQGTLVTVSAAKTTAPSVYPLAPVCGDTTGSSVTLGCLVKGYFPEPVTLTWNSGSLSSGVHTFPAVLQSDLYTLSSSVTVTSSTWPSQSITCNVAHPASSTKVDKKIEPRGPTIKPCPPCKCPAPNLEGGPSVFIFPPKIKDVLMISLSPIVTCVVVDVSEDDPDVQISWFVNNVEVHTAQTQTHREDYNSTLRVVSALPIQHQDWMSGKAFACAVNNKDLPAPIERTISKPKGSVRAPQVYVLPPPEEEMTKKQVTLTCMVTDFMPEDIYVEWTNNGKTELNYKNTEPVLDSDGSYFMYSKLRVEKKNWVERNSYSCSVVHEGLHNHHTTKSFSRTPGKGGGGAGGGGDVALTQTPVAQPVTLGDQASISCRSSQSLVHSNGRTYLEWYLQKPGQSPQLLIYKVSNRFSGVPDRFIGSGSGSDFTLTISRVEPEDLGVYYCFQATHDPNTFGAGTKLELKGGGGSGGGGSGGGGSQVQLQQSGAELVKPGSSVKISCKASGYTFTSHFIHWIKQQPGNGLEWIGGIYPGDGDTEYNQQFNGKATLTADKSSSTAYMRLSSLTSEDSAVYFCATRVPSYWFFDFWGPGTMVTVSS

SEQ ID NO: 26 - protein, 233 aa, Artificial Sequence
  Description of Artificial Sequence: Synthetic polypeptide
MEWSWVFLFFLSVTTGVHSDILLTQSPAILSVRPGERVSFSCRASQSLGTSIHWYQQRTDGSPRLLIKYASESISGIPSRFSGSGSGTDFTLSINSVESEDIADYYCQQSNSWPITFGAGTKLELKRADAAPTVSIFPPSSEQLTSGGASVVCFLNNFYPKDINVKWKIDGSERQNGVLNSWTDQDSKDSTYSMSSTLTLTKDEYERHNSYTCEATHKTSTSPIVKSFNRNEC

SEQ ID NO: 27 - DNA, 2115 bp, Homo sapiens
agtttcccttccgctcacctccgcctgagcagtggagaaggcggcactctggtggggctgctccaggcatgcagatcccacaggcgccctggccagtcgtctgggcggtgctacaactgggctggcggccaggatggttcttagactccccagacaggccctggaacccccccaccttctccccagccctgctcgtggtgaccgaaggggacaacgccaccttcacctgcagcttctccaacacatcggagagcttcgtgctaaactggtaccgcatgagccccagcaaccagacggacaagctggccgccttccccgaggaccgcagccagcccggccaggactgccgcttccgtgtcacacaactgcccaacgggcgtgacttccacatgagcgtggtcagggcccggcgcaatgacagcggcacctacctctgtggggccatctccctggcccccaaggcgcagatcaaagagagcctgcgggcagagctcagggtgacagagagaagggcagaagtgcccacagcccaccccagcccctcacccaggccagccggccagttccaaaccctggtggttggtgtcgtgggcggcctgctgggcagcctggtgctgctagtctgggtcctggccgtcatctgctcccgggccgcacgagggacaataggagccaggcgcaccggccagcccctgaaggaggacccctcagccgtgcctgtgttctctgtggactatggggagctggatttccagtggcgagagaagaccccggagccccccgtgccctgtgtccctgagcagacggagtatgccaccattgtctttcctagcggaatgggcacctcatcccccgcccgcaggggctcagctgacggccctcggagtgcccagccactgaggcctgaggatggacactgctcttggcccctctgaccggcttccttggccaccagtgttctgcagaccctccaccatgagcccgggtcagcgcatttcctcaggagaagcaggcagggtgcaggccattgcaggccgtccaggggctgagctgcctgggggcgaccggggctccagcctgcacctgcaccaggcacagccccaccacaggactcatgtctcaatgcccacagtgagcccaggcagcaggtgtcaccgtcccctacagggagggccagatgcagtcactgcttcaggtcctgccagcacagagctgcctgcgtccagctccctgaatctctgctgctgctgctgctgctgctgctgctgcctgcggcccggggctgaaggcgccgtggccctgcctgacgccccggagcctcctgcctgaacttgggggctggttggagatggccttggagcagccaaggtgcccctggcagtggcatcccgaaacgccctggacgcagggcccaagactgggcacaggagtgggaggtacatggggctggggactccccaggagttatctgctccctgcaggcctagagaagtttcagggaaggtcagaagagctcctggctgtggtgggcagggcaggaaacccctccacctttacacatgcccaggcagcacctcaggccctttgtggggcagggaagctgaggcagtaagcgggcaggcagagctggaggcctttcaggcccagccagcactctggcctcctgccgccgcattccaccccagcccctcacaccactcgggagagggacatcctacggtcccaaggtcaggagggcagggctggggttgactcaggcccctcccagctgtggccacctgggtgttgggagggcagaagtgcaggcacctagggccccccatgtgcccaccctgggagctctccttggaacccattcctgaaattatttaaaggggttggccgggctcccaccagggcctgggtgggaaggtacaggcgttcccccggggcctagtacccccgccgtggcctatccactcctcacatccacacactgcacccccactcctggggcagggccaccagcatccaggcggccagcaggcacctgagtggctgggacaagggatcccccttccctgtggttctattatattataattataattaaatatgagagcatgctaaggaaaa

SEQ ID NO: 28 - protein, 288 aa, Homo sapiens
MQIPQAPWPVVWAVLQLGWRPGWFLDSPDRPWNPPTFSPALLVVTEGDNATFTCSFSNTSESFVLNWYRMSPSNQTDKLAAFPEDRSQPGQDCRFRVTQLPNGRDFHMSVVRARRNDSGTYLCGAISLAPKAQIKESLRAELRVTERRAEVPTAHPSPSPRPAGQFQTLVVGVVGGLLGSLVLLVWVLAVICSRAARGTIGARRTGQPLKEDPSAVPVFSVDYGELDFQWREKTPEPPVPCVPEQTEYATIVFPSGMGTSSPARRGSADGPRSAQPLRPEDGHCSWPL

SEQ ID NO: 29 - DNA, 1972 bp, Mus musculus
tgagcagcggggaggaggaagaggagactgctactgaaggcgacactgccaggggctctgggcatgtgggtccggcaggtaccctggtcattcacttgggctgtgctgcagttgagctggcaatcagggtggcttctagaggtccccaatgggccctggaggtccctcaccttctacccagcctggctcacagtgtcagagggagcaaatgccaccttcacctgcagcttgtccaactggtcggaggatcttatgctgaactggaaccgcctgagtcccagcaaccagactgaaaaacaggccgccttctgtaatggtttgagccaacccgtccaggatgcccgcttccagatcatacagctgcccaacaggcatgacttccacatgaacatccttgacacacggcgcaatgacagtggcatctacctctgtggggccatctccctgcaccccaaggcaaaaatcgaggagagccctggagcagagctcgtggtaacagagagaatcctggagacctcaacaagatatcccagcccctcgcccaaaccagaaggccggtttcaaggcatggtcattggtatcatgagtgccctagtgggtatccctgtattgctgctgctggcctgggccctagctgtcttctgctcaacaagtatgtcagaggccagaggagctggaagcaaggacgacactctgaaggaggagccttcagcagcacctgtccctagtgtggcctatgaggagctggacttccagggacgagagaagacaccagagctccctaccgcctgtgtgcacacagaatatgccaccattgtcttcactgaagggctgggtgcctcggccatgggacgtaggggctcagctgatggcctgcagggtcctcggcctccaagacatgaggatggacattgttcttggcctctttgaccagattcttcagccattagcatgctgcagaccctccacagagagcaccggtccgtccctcagtcaagaggagcatgcaggctacagttcagccaaggctcccagggtctgagctagctggagtgacagcccagcgcctgcaccaattccagcacatgcactgttgagtgagagctcacttcaggtttaccacaagctgggagcagcaggcttcccggtttcctattgtcacaaggtgcagagctggggcctaagcctatgtctcctgaatcctactgttgggcacttctagggacttgagacactatagccaatggcctctgtgggttctgtgcctggaaatggagagatctgagtacagcctgctttgaatggccctgtgaggcaaccccaaagcaagggggtccaggtatactatgggcccagcacctaaagccacccttgggagatgatactcaggtgggaaattcgtagactgggggactgaaccaatcccaagatctggaaaagttttgatgaagacttgaaaagctcctagcttcgggggtctgggaagcatgagcacttaccaggcaaaagctccgtgagcgtatctgctgtccttctgcatgcccaggtacctcagtttttttcaacagcaaggaaactagggcaataaagggaaccagcagagctagagccacccacacatccagggggcacttgactctccctactcctcctaggaaccaaaaggacaaagtccatgttgacagcagggaaggaaagggggatataaccttgacgcaaaccaacactggggtgttagaatctcctcattcactctgtcctggagttgggttctggctctccttcacacctaggactctgaaatgagcaagcacttcagacagtcagggtagcaagagtctagctgtctggtgggcacccaaaatgaccagggcttaagtccctttcctttggtttaagcccgttataattaaatggtaccaaaagctttaaaaaaaaaaaaaaaaaaaaaaaaaaaaaaaaaaaaaaaaaa

SEQ ID NO: 30 - protein, 119 aa, Mus musculus
QVQLQQSGAELVKPGSSVKISCKASGYTFTSHFIHWIKQQPGNGLEWIGGIYPGDGDTEYNQQFNGKATLTADKSSSTAYMRLSSLTSEDSAVYFCATRVPSYWFFDFWGPGTMVTVSS

SEQ ID NO: 31 - protein, 112 aa, Artificial Sequence
  Description of Artificial Sequence: Synthetic polypeptide
DVALTQTPVAQPVTLGDQASISCRSSQSLVHSNGRTYLEWYLQKPGQSPQLLIYKVSNRFSGVPDRFIGSGSGSDFTLTISRVEPEDLGVYYCFQATHDPNTFGAGTKLELK

SEQ ID NO: 32 - protein, 698 aa, Artificial Sequence
  Description of Artificial Sequence: Synthetic polypeptide
QIQLVQSGPELKKPGETVKISCKASGYTFTNYLLNWVKQAPGKGLKWMGWINTYTGEPTYTDDFKGRFAFSLATSASTAYLQINNLKNEDTATYFCVRLAGTKDYWGQGTTLTVSSASTKGPSVFPLAPCSRSTSESTAALGCLVKDYFPEPVTVSWNSGALTSGVHTFPAVLQSSGLYSLSSVVTVPSSSLGTKTYTCNVDHKPSNTKVDKRVESKYGPPCPSCPAPEFLGGPSVFLFPPKPKDTLMISRTPEVTCVVVDVSQEDPEVQFNWYVDGVEVHNAKTKPREEQFNSTYRVVSVLTVLHQDWLNGKEYKCKVSNKGLPSSIEKTISKAKGQPREPQVYTLPPSQEEMTKNQVSLTCLVKGFYPSDIAVEWESNGQPENNYKTTPPVLDSDGSFFLYSRLTVDKSRWQEGNVFSCSVMHEALHNHYTQKSLSLSLGKGGGGAGGGGQVQLVQSGVEVKKPGASVKVSCKASGYTFTNYYMYWVRQAPGQGLEWMGGINPSNGGTNFNEKFKNRVTLTTDSSTTTAYMELKSLQFDDTAVYYCARRDYRFDMGFDYWGQGTTVTVSSGGGGSGGGGSGGGGSEIVLTQSPATLSLSPGERATLSCRASKGVSTSGYSYLHWYQQKPGQAPRLLIYLASYLESGVPARFSGSGSGTDFTLTISSLEPEDFAVYYCQHSRDLPLTFGGGTKVEIK

SEQ ID NO: 33 - protein, 219 aa, Artificial Sequence
  Description of Artificial Sequence: Synthetic polypeptide
DIVMTQAAFSNPVTLGTSASISCRSSKSLLHSNGITYLYWYLQKPGQSPQLLIYQMSNLASGVPDRFSSSGSGTDFTLRISRVEAEDVGVYYCAQNLELPRTFGGGTKLEIKRTVAAPSVFIFPPSDEQLKSGTASVVCLLNNFYPREAKVQWKVDNALQSGNSQESVTEQDSKDSTYSLSSTLTLSKADYEKHKVYACEVTHQGLSSPVTKSFNRGEC

SEQ ID NO: 34 - protein, 698 aa, Artificial Sequence
  Description of Artificial Sequence: Synthetic polypeptide
QIQLVQSGPELKKPGETVKISCKASGYTFTNYLLNWVKQAPGKGLKWMGWINTYTGEPTYTDDFKGRFAFSLATSASTAYLQINNLKNEDTATYFCVRLAGTKDYWGQGTTLTVSSASTKGPSVFPLAPCSRSTSESTAALGCLVKDYFPEPVTVSWNSGALTSGVHTFPAVLQSSGLYSLSSVVTVPSSSLGTKTYTCNVDHKPSNTKVDKRVESKYGPPCPSCPAPEFLGGPSVFLFPPKPKDTLMISRTPEVTCVVVDVSQEDPEVQFNWYVDGVEVHNAKTKPREEQFNSTYRVVSVLTVLHQDWLNGKEYKCKVSNKGLPSSIEKTISKAKGQPREPQVYTLPPSQEEMTKNQVSLTCLVKGFYPSDIAVEWESNGQPENNYKTTPPVLDSDGSFFLYSRLTVDKSRWQEGNVFSCSVMHEALHNHYTQKSLSLSLGKGGGGAGGGGEIVLTQSPATLSLSPGERATLSCRASKGVSTSGYSYLHWYQQKPGQAPRLLIYLASYLESGVPARFSGSGSGTDFTLTISSLEPEDFAVYYCQHSRDLPLTFGGGTKVEIKGGGGSGGGGSGGGGSQVQLVQSGVEVKKPGASVKVSCKASGYTFTNYYMYWVRQAPGQGLEWMGGINPSNGGTNFNEKFKNRVTLTTDSSTTTAYMELKSLQFDDTAVYYCARRDYRFDMGFDYWGQGTTVTVSS

SEQ ID NO: 35 - protein, 219 aa, Artificial Sequence; identical to SEQ ID NO: 33
  Description of Artificial Sequence: Synthetic polypeptide

SEQ ID NO: 36 - protein, 699 aa, Artificial Sequence
  Description of Artificial Sequence: Synthetic polypeptide
QVQLVQSGVEVKKPGASVKVSCKASGYTFTNYYMYWVRQAPGQGLEWMGGINPSNGGTNFNEKFKNRVTLTTDSSTTTAYMELKSLQFDDTAVYYCARRDYRFDMGFDYWGQGTTVTVSSASTKGPSVFPLAPCSRSTSESTAALGCLVKDYFPEPVTVSWNSGALTSGVHTFPAVLQSSGLYSLSSVVTVPSSSLGTKTYTCNVDHKPSNTKVDKRVESKYGPPCPSCPAPEFLGGPSVFLFPPKPKDTLMISRTPEVTCVVVDVSQEDPEVQFNWYVDGVEVHNAKTKPREEQFNSTYRVVSVLTVLHQDWLNGKEYKCKVSNKGLPSSIEKTISKAKGQPREPQVYTLPPSQEEMTKNQVSLTCLVKGFYPSDIAVEWESNGQPENNYKTTPPVLDSDGSFFLYSRLTVDKSRWQEGNVFSCSVMHEALHNHYTQKSLSLSLGKGGGGAGGGGQIQLVQSGPELKKPGETVKISCKASGYTFTNYLLNWVKQAPGKGLKWMGWINTYTGEPTYTDDFKGRFAFSLATSASTAYLQINNLKNEDTATYFCVRLAGTKDYWGQGTTLTVSSGGGGSGGGGSGGGGSDIVMTQAAFSNPVTLGTSASISCRSSKSLLHSNGITYLYWYLQKPGQSPQLLIYQMSNLASGVPDRFSSSGSGTDFTLRISRVEAEDVGVYYCAQNLELPRTFGGGTKLEIK

SEQ ID NO: 37 - protein, 218 aa, Artificial Sequence
  Description of Artificial Sequence: Synthetic polypeptide
EIVLTQSPATLSLSPGERATLSCRASKGVSTSGYSYLHWYQQKPGQAPRLLIYLASYLESGVPARFSGSGSGTDFTLTISSLEPEDFAVYYCQHSRDLPLTFGGGTKVEIKRTVAAPSVFIFPPSDEQLKSGTASVVCLLNNFYPREAKVQWKVDNALQSGNSQESVTEQDSKDSTYSLSSTLTLSKADYEKHKVYACEVTHQGLSSPVTKSFNRGEC

SEQ ID NO: 38 - protein, 699 aa, Artificial Sequence
  Description of Artificial Sequence: Synthetic polypeptide
QVQLVQSGVEVKKPGASVKVSCKASGYTFTNYYMYWVRQAPGQGLEWMGGINPSNGGTNFNEKFKNRVTLTTDSSTTTAYMELKSLQFDDTAVYYCARRDYRFDMGFDYWGQGTTVTVSSASTKGPSVFPLAPCSRSTSESTAALGCLVKDYFPEPVTVSWNSGALTSGVHTFPAVLQSSGLYSLSSVVTVPSSSLGTKTYTCNVDHKPSNTKVDKRVESKYGPPCPSCPAPEFLGGPSVFLFPPKPKDTLMISRTPEVTCVVVDVSQEDPEVQFNWYVDGVEVHNAKTKPREEQFNSTYRVVSVLTVLHQDWLNGKEYKCKVSNKGLPSSIEKTISKAKGQPREPQVYTLPPSQEEMTKNQVSLTCLVKGFYPSDIAVEWESNGQPENNYKTTPPVLDSDGSFFLYSRLTVDKSRWQEGNVFSCSVMHEALHNHYTQKSLSLSLGKGGGGAGGGGDIVMTQAAFSNPVTLGTSASISCRSSKSLLHSNGITYLYWYLQKPGQSPQLLIYQMSNLASGVPDRFSSSGSGTDFTLRISRVEAEDVGVYYCAQNLELPRTFGGGTKLEIKGGGGSGGGGSGGGGSQIQLVQSGPELKKPGETVKISCKASGYTFTNYLLNWVKQAPGKGLKWMGWINTYTGEPTYTDDFKGRFAFSLATSASTAYLQINNLKNEDTATYFCVRLAGTKDYWGQGTTLTVSS

SEQ ID NO: 39 - protein, 218 aa, Artificial Sequence; identical to SEQ ID NO: 37
  Description of Artificial Sequence: Synthetic polypeptide

SEQ ID NO: 40 - protein, 701 aa, Artificial Sequence
  Description of Artificial Sequence: Synthetic polypeptide
QIQLVQSGPELKKPGETVKISCKASGYTFTNYLLNWVKQAPGKGLKWMGWINTYTGEPTYTDDFKGRFAFSLATSASTAYLQINNLKNEDTATYFCVRLAGTKDYWGQGTTLTVSSASTKGPSVFPLAPSSKSTSGGTAALGCLVKDYFPEPVTVSWNSGALTSGVHTFPAVLQSSGLYSLSSVVTVPSSSLGTQTYICNVNHKPSNTKVDKKVEPKSCDKTHTCPPCPAPEAAGGPSVFLFPPKPKDTLMISRTPEVTCVVVDVSHEDPEVKFNWYVDGVEVHNAKTKPREEQYNSTYRVVSVLTVLHQDWLNGKEYKCKVSNKALPAPIEKTISKAKGQPREPQVYTLPPSRDELTKNQVSLWCLVKGFYPSDIAVEWESNGQPENNYKTTPPVLDSDGSFFLYSKLTVDKSRWQQGNVFSCSVMHEALHNHYTQKSLSLSPGKGGGGAGGGGQVQLVQSGVEVKKPGASVKVSCKASGYTFTNYYMYWVRQAPGQGLEWMGGINPSNGGTNFNEKFKNRVTLTTDSSTTTAYMELKSLQFDDTAVYYCARRDYRFDMGFDYWGQGTTVTVSSGGGGSGGGGSGGGGSEIVLTQSPATLSLSPGERATLSCRASKGVSTSGYSYLHWYQQKPGQAPRLLIYLASYLESGVPARFSGSGSGTDFTLTISSLEPEDFAVYYCQHSRDLPLTFGGGTKVEIK

SEQ ID NO: 41 - protein, 446 aa, Artificial Sequence
  Description of Artificial Sequence: Synthetic polypeptide
QIQLVQSGPELKKPGETVKISCKASGYTFTNYLLNWVKQAPGKGLKWMGWINTYTGEPTYTDDFKGRFAFSLATSASTAYLQINNLKNEDTATYFCVRLAGTKDYWGQGTTLTVSSASTKGPSVFPLAPSSKSTSGGTAALGCLVKDYFPEPVTVSWNSGALTSGVHTFPAVLQSSGLYSLSSVVTVPSSSLGTQTYICNVNHKPSNTKVDKKVEPKSCDKTHTCPPCPAPEAAGGPSVFLFPPKPKDTLMISRTPEVTCVVVDVSHEDPEVKFNWYVDGVEVHNAKTKPREEQYNSTYRVVSVLTVLHQDWLNGKEYKCKVSNKALPAPIEKTISKAKGQPREPQVYTLPPSRDELTKNQVSLWCLVKGFYPSDIAVEWESNGQPENNYKTTPPVLDSDGSFFLYSKLTVDKSRWQQGNVFSCSVMHEALHNHYTQKSLSLSPGK

SEQ ID NO: 42 - protein, 219 aa, Artificial Sequence; identical to SEQ ID NO: 33
  Description of Artificial Sequence: Synthetic polypeptide

SEQ ID NO: 43 - protein, 701 aa, Artificial Sequence
  Description of Artificial Sequence: Synthetic polypeptide
QIQLVQSGPELKKPGETVKISCKASGYTFTNYLLNWVKQAPGKGLKWMGWINTYTGEPTYTDDFKGRFAFSLATSASTAYLQINNLKNEDTATYFCVRLAGTKDYWGQGTTLTVSSASTKGPSVFPLAPSSKSTSGGTAALGCLVKDYFPEPVTVSWNSGALTSGVHTFPAVLQSSGLYSLSSVVTVPSSSLGTQTYICNVNHKPSNTKVDKKVEPKSCDKTHTCPPCPAPEAAGGPSVFLFPPKPKDTLMISRTPEVTCVVVDVSHEDPEVKFNWYVDGVEVHNAKTKPREEQYNSTYRVVSVLTVLHQDWLNGKEYKCKVSNKALPAPIEKTISKAKGQPREPQVYTLPPSRDELTKNQVSLWCLVKGFYPSDIAVEWESNGQPENNYKTTPPVLDSDGSFFLYSKLTVDKSRWQQGNVFSCSVMHEALHNHYTQKSLSLSPGKGGGGAGGGGEIVLTQSPATLSLSPGERATLSCRASKGVSTSGYSYLHWYQQKPGQAPRLLIYLASYLESGVPARFSGSGSGTDFTLTISSLEPEDFAVYYCQHSRDLPLTFGGGTKVEIKGGGGSGGGGSGGGGSQVQLVQSGVEVKKPGASVKVSCKASGYTFTNYYMYWVRQAPGQGLEWMGGINPSNGGTNFNEKFKNRVTLTTDSSTTTAYMELKSLQFDDTAVYYCARRDYRFDMGFDYWGQGTTVTVSS

SEQ ID NO: 44 - protein, 219 aa, Artificial Sequence; identical to SEQ ID NO: 33
  Description of Artificial Sequence: Synthetic polypeptide

SEQ ID NO: 45 - protein, 701 aa, Artificial Sequence; identical to SEQ ID NO: 40
  Description of Artificial Sequence: Synthetic polypeptide

SEQ ID NO: 46 - protein, 446 aa, Artificial Sequence; identical to SEQ ID NO: 41
  Description of Artificial Sequence: Synthetic polypeptide

SEQ ID NO: 47 - protein, 219 aa, Artificial Sequence; identical to SEQ ID NO: 33
  Description of Artificial Sequence: Synthetic polypeptide

SEQ ID NO: 48 - protein, 701 aa, Artificial Sequence; identical to SEQ ID NO: 43
  Description of Artificial Sequence: Synthetic polypeptide

SEQ ID NO: 49 - protein, 446 aa, Artificial Sequence; identical to SEQ ID NO: 41
  Description of Artificial Sequence: Synthetic polypeptide

SEQ ID NO: 50 - protein, 219 aa, Artificial Sequence; identical to SEQ ID NO: 33
  Description of Artificial Sequence: Synthetic polypeptide

SEQ ID NO: 51 - protein, 446 aa, Artificial Sequence; identical to SEQ ID NO: 41
  Description of Artificial Sequence: Synthetic polypeptide

SEQ ID NO: 52 - protein, 450 aa, Artificial Sequence
  Description of Artificial Sequence: Synthetic polypeptide
QVQLVQSGVEVKKPGASVKVSCKASGYTFTNYYMYWVRQAPGQGLEWMGGINPSNGGTNFNEKFKNRVTLTTDSSTTTAYMELKSLQFDDTAVYYCARRDYRFDMGFDYWGQGTTVTVSSASTKGPSVFPLAPSSKSTSGGTAALGCLVKDYFPEPVTVSWNSGALTSGVHTFPAVLQSSGLYSLSSVVTVPSSSLGTQTYICNVNHKPSNTKVDKKVEPKSCDKTHTCPPCPAPEAAGGPSVFLFPPKPKDTLMISRTPEVTCVVVDVSHEDPEVKFNWYVDGVEVHNAKTKPREEQYNSTYRVVSVLTVLHQDWLNGKEYKCKVSNKALPAPIEKTISKAKGQPREPQVYTLPPSRDELTKNQVSLWCLVKGFYPSDIAVEWESNGQPENNYKTTPPVLDSDGSFFLYSKLTVDKSRWQQGNVFSCSVMHEALHNHYTQKSLSLSPGK

SEQ ID NO: 53 - protein, 219 aa, Artificial Sequence; identical to SEQ ID NO: 33
  Description of Artificial Sequence: Synthetic polypeptide

SEQ ID NO: 54 - protein, 218 aa, Artificial Sequence; identical to SEQ ID NO: 37
  Description of Artificial Sequence: Synthetic polypeptide

SEQ ID NO: 55 - protein, 446 aa, Artificial Sequence; identical to SEQ ID NO: 41
  Description of Artificial Sequence: Synthetic polypeptide

SEQ ID NO: 56 - protein, 450 aa, Artificial Sequence; identical to SEQ ID NO: 52
  Description of Artificial Sequence: Synthetic polypeptide

SEQ ID NO: 57 - protein, 219 aa, Artificial Sequence; identical to SEQ ID NO: 33
  Description of Artificial Sequence: Synthetic polypeptide

SEQ ID NO: 58 - protein, 218 aa, Artificial Sequence; identical to SEQ ID NO: 37
  Description of Artificial Sequence: Synthetic polypeptide

SEQ ID NO: 59 - protein, 687 aa, Artificial Sequence
  Description of Artificial Sequence: Synthetic polypeptide
QIQLVQSGPELKKPGETVKISCKASGYTFTNYLLNWVKQAPGKGLKWMGWINTYTGEPTYTDDFKGRFAFSLATSASTAYLQINNLKNEDTATYFCVRLAGTKDYWGQGTTLTVSSASTKGPSVFPLAPCSRSTSESTAALGCLVKDYFPEPVTVSWNSGALTSGVHTFPAVLQSSGLYSLSSVVTVPSSSLGTKTYTCNVDHKPSNTKVDKRVESKYGPPCPSCPAPEFLGGPSVFLFPPKPKDTLMISRTPEVTCVVVDVSQEDPEVQFNWYVDGVEVHNAKTKPREEQFNSTYRVVSVLTVLHQDWLNGKEYKCKVSNKGLPSSIEKTISKAKGQPREPQVYTLPPSQEEMTKNQVSLTCLVKGFYPSDIAVEWESNGQPENNYKTTPPVLDSDGSFFLYSRLTVDKSRWQEGNVFSCSVMHEALHNHYTQKSLSLSLGKGGGGAGGGGQVQLVESGGGVVQPGRSLRLDCKASGITFSNSGMHWVRQAPGKGLEWVAVIWYDGSKRYYADSVKGRFTISRDNSKNTLFLQMNSLRAEDTAVYYCATNDDYWGQGTLVTVSSGGGGSGGGGSGGGGSEIVLTQSPATLSLSPGERATLSCRASQSVSSYLAWYQQKPGQAPRLLIYDASNRATGIPARFSGSGSGTDFTLTISSLEPEDFAVYYCQQSSNWPRTFGQGTKVEIK

SEQ ID NO: 60 - protein, 219 aa, Artificial Sequence; identical to SEQ ID NO: 33
  Description of Artificial Sequence: Synthetic polypeptide

SEQ ID NO: 61 - protein, 687 aa, Artificial Sequence
  Description of Artificial Sequence: Synthetic polypeptide
QIQLVQSGPELKKPGETVKISCKASGYTFTNYLLNWVKQAPGKGLKWMGWINTYTGEPTYTDDFKGRFAFSLATSASTAYLQINNLKNEDTATYFCVRLAGTKDYWGQGTTLTVSSASTKGPSVFPLAPCSRSTSESTAALGCLVKDYFPEPVTVSWNSGALTSGVHTFPAVLQSSGLYSLSSVVTVPSSSLGTKTYTCNVDHKPSNTKVDKRVESKYGPPCPSCPAPEFLGGPSVFLFPPKPKDTLMISRTPEVTCVVVDVSQEDPEVQFNWYVDGVEVHNAKTKPREEQFNSTYRVVSVLTVLHQDWLNGKEYKCKVSNKGLPSSIEKTISKAKGQPREPQVYTLPPSQEEMTKNQVSLTCLVKGFYPSDIAVEWESNGQPENNYKTTPPVLDSDGSFFLYSRLTVDKSRWQEGNVFSCSVMHEALHNHYTQKSLSLSLGKGGGGAGGGGEIVLTQSPATLSLSPGERATLSCRASQSVSSYLAWYQQKPGQAPRLLIYDASNRATGIPARFSGSGSGTDFTLTISSLEPEDFAVYYCQQSSNWPRTFGQGTKVEIKGGGGSGGGGSGGGGSQVQLVESGGGVVQPGRSLRLDCKASGITFSNSGMHWVRQAPGKGLEWVAVIWYDGSKRYYADSVKGRFTISRDNSKNTLFLQMNSLRAEDTAVYYCATNDDYWGQGTLVTVSS

SEQ ID NO: 62 - protein, 219 aa, Artificial Sequence; identical to SEQ ID NO: 33
  Description of Artificial Sequence: Synthetic polypeptide

SEQ ID NO: 63 - protein, 692 aa, Artificial Sequence
  Description of Artificial Sequence: Synthetic polypeptide
QVQLVESGGGVVQPGRSLRLDCKASGITFSNSGMHWVRQAPGKGLEWVAVIWYDGSKRYYADSVKGRFTISRDNSKNTLFLQMNSLRAEDTAVYYCATNDDYWGQGTLVTVSSASTKGPSVFPLAPCSRSTSESTAALGCLVKDYFPEPVTVSWNSGALTSGVHTFPAVLQSSGLYSLSSVVTVPSSSLGTKTYTCNVDHKPSNTKVDKRVESKYGPPCPSCPAPEFLGGPSVFLFPPKPKDTLMISRTPEVTCVVVDVSQEDPEVQFNWYVDGVEVHNAKTKPREEQFNSTYRVVSVLTVLHQDWLNGKEYKCKVSNKGLPSSIEKTISKAKGQPREPQVYTLPPSQEEMTKNQVSLTCLVKGFYPSDIAVEWESNGQPENNYKTTPPVLDSDGSFFLYSRLTVDKSRWQEGNVFSCSVMHEALHNHYTQKSLSLSLGKGGGGAGGGGQIQLVQSGPELKKPGETVKISCKASGYTFTNYLLNWVKQAPGKGLKWMGWINTYTGEPTYTDDFKGRFAFSLATSASTAYLQINNLKNEDTATYFCVRLAGTKDYWGQGTTLTVSSGGGGSGGGGSGGGGSDIVMTQAAFSNPVTLGTSASISCRSSKSLLHSNGITYLYWYLQKPGQSPQLLIYQMSNLASGVPDRFSSSGSGTDFTLRISRVEAEDVGVYYCAQNLELPRTFGGGTKLEIK

SEQ ID NO: 64 - protein, 214 aa, Artificial Sequence
  Description of Artificial Sequence: Synthetic polypeptide
EIVLTQSPATLSLSPGERATLSCRASQSVSSYLAWYQQKPGQAPRLLIYDASNRATGIPARFSGSGSGTDFTLTISSLEPEDFAVYYCQQSSNWPRTFGQGTKVEIKRTVAAPSVFIFPPSDEQLKSGTASVVCLLNNFYPREAKVQWKVDNALQSGNSQESVTEQDSKDSTYSLSSTLTLSKADYEKHKVYACEVTHQGLSSPVTKSFNRGEC

SEQ ID NO: 65 - protein, 692 aa, Artificial Sequence
  Description of Artificial Sequence: Synthetic polypeptide
QVQLVESGGGVVQPGRSLRLDCKASGITFSNSGMHWVRQAPGKGLEWVAVIWYDGSKRYYADSVKGRFTISRDNSKNTLFLQMNSLRAEDTAVYYCATNDDYWGQGTLVTVSSASTKGPSVFPLAPCSRSTSESTAALGCLVKDYFPEPVTVSWNSGALTSGVHTFPAVLQSSGLYSLSSVVTVPSSSLGTKTYTCNVDHKPSNTKVDKRVESKYGPPCPSCPAPEFLGGPSVFLFPPKPKDTLMISRTPEVTCVVVDVSQEDPEVQFNWYVDGVEVHNAKTKPREEQFNSTYRVVSVLTVLHQDWLNGKEYKCKVSNKGLPSSIEKTISKAKGQPREPQVYTLPPSQEEMTKNQVSLTCLVKGFYPSDIAVEWESNGQPENNYKTTPPVLDSDGSFFLYSRLTVDKSRWQEGNVFSCSVMHEALHNHYTQKSLSLSLGKGGGGAGGGGDIVMTQAAFSNPVTLGTSASISCRSSKSLLHSNGITYLYWYLQKPGQSPQLLIYQMSNLASGVPDRFSSSGSGTDFTLRISRVEAEDVGVYYCAQNLELPRTFGGGTKLEIKGGGGSGGGGSGGGGSQIQLVQSGPELKKPGETVKISCKASGYTFTNYLLNWVKQAPGKGLKWMGWINTYTGEPTYTDDFKGRFAFSLATSASTAYLQINNLKNEDTATYFCVRLAGTKDYWGQGTTLTVSS

SEQ ID NO: 66 - protein, 214 aa, Artificial Sequence; identical to SEQ ID NO: 64
  Description of Artificial Sequence: Synthetic polypeptide

SEQ ID NO: 67 - protein, 690 aa, Artificial Sequence
  Description of Artificial Sequence: Synthetic polypeptide
QIQLVQSGPELKKPGETVKISCKASGYTFTNYLLNWVKQAPGKGLKWMGWINTYTGEPTYTDDFKGRFAFSLATSASTAYLQINNLKNEDTATYFCVRLAGTKDYWGQGTTLTVSSASTKGPSVFPLAPSSKSTSGGTAALGCLVKDYFPEPVTVSWNSGALTSGVHTFPAVLQSSGLYSLSSVVTVPSSSLGTQTYICNVNHKPSNTKVDKKVEPKSCDKTHTCPPCPAPEAAGGPSVFLFPPKPKDTLMISRTPEVTCVVVDVSHEDPEVKFNWYVDGVEVHNAKTKPREEQYNSTYRVVSVLTVLHQDWLNGKEYKCKVSNKALPAPIEKTISKAKGQPREPQVYTLPPSRDELTKNQVSLWCLVKGFYPSDIAVEWESNGQPENNYKTTPPVLDSDGSFFLYSKLTVDKSRWQQGNVFSCSVMHEALHNHYTQKSLSLSPGKGGGGAGGGGQVQLVESGGGVVQPGRSLRLDCKASGITFSNSGMHWVRQAPGKGLEWVAVIWYDGSKRYYADSVKGRFTISRDNSKNTLFLQMNSLRAEDTAVYYCATNDDYWGQGTLVTVSSGGGGSGGGGSGGGGSEIVLTQSPATLSLSPGERATLSCRASQSVSSYLAWYQQKPGQAPRLLIYDASNRATGIPARFSGSGSGTDFTLTISSLEPEDFAVYYCQQSSNWPRTFGQGTKVEIK

SEQ ID NO: 68 - protein, 446 aa, Artificial Sequence; identical to SEQ ID NO: 41
  Description of Artificial Sequence: Synthetic polypeptide

SEQ ID NO: 69 - protein, 219 aa, Artificial Sequence; identical to SEQ ID NO: 33
  Description of Artificial Sequence: Synthetic polypeptide

SEQ ID NO: 70 - protein, 690 aa, Artificial Sequence
  Description of Artificial Sequence: Synthetic polypeptide
QIQLVQSGPELKKPGETVKISCKASGYTFTNYLLNWVKQAPGKGLKWMGWINTYTGEPTYTDDFKGRFAFSLATSASTAYLQINNLKNEDTATYFCVRLAGTKDYWGQGTTLTVSSASTKGPSVFPLAPSSKSTSGGTAALGCLVKDYFPEPVTVSWNSGALTSGVHTFPAVLQSSGLYSLSSVVTVPSSSLGTQTYICNVNHKPSNTKVDKKVEPKSCDKTHTCPPCPAPEAAGGPSVFLFPPKPKDTLMISRTPEVTCVVVDVSHEDPEVKFNWYVDGVEVHNAKTKPREEQYNSTYRVVSVLTVLHQDWLNGKEYKCKVSNKALPAPIEKTISKAKGQPREPQVYTLPPSRDELTKNQVSLWCLVKGFYPSDIAVEWESNGQPENNYKTTPPVLDSDGSFFLYSKLTVDKSRWQQGNVFSCSVMHEALHNHYTQKSLSLSPGKGGGGAGGGGEIVLTQSPATLSLSPGERATLSCRASQSVSSYLAWYQQKPGQAPRLLIYDASNRATGIPARFSGSGSGTDFTLTISSLEPEDFAVYYCQQSSNWPRTFGQGTKVEIKGGGGSGGGGSGGGGSQVQLVESGGGVVQPGRSLRLDCKASGITFSNSGMHWVRQAPGKGLEWVAVIWYDGSKRYYADSVKGRFTISRDNSKNTLFLQMNSLRAEDTAVYYCATNDDYWGQGTLVTVSS

SEQ ID NO: 71 - protein, 219 aa, Artificial Sequence; identical to SEQ ID NO: 33
  Description of Artificial Sequence: Synthetic polypeptide

SEQ ID NO: 72 - protein, 690 aa, Artificial Sequence; identical to SEQ ID NO: 67
  Description of Artificial Sequence: Synthetic polypeptide

SEQ ID NO: 73 - protein, 446 aa, Artificial Sequence; identical to SEQ ID NO: 41
  Description of Artificial Sequence: Synthetic polypeptide

SEQ ID NO: 74 - protein, 219 aa, Artificial Sequence; identical to SEQ ID NO: 33
  Description of Artificial Sequence: Synthetic polypeptide

SEQ ID NO: 75 - protein, 690 aa, Artificial Sequence; identical to SEQ ID NO: 70
  Description of Artificial Sequence: Synthetic polypeptide

SEQ ID NO: 76 - protein, 446 aa, Artificial Sequence; identical to SEQ ID NO: 41
  Description of Artificial Sequence: Synthetic polypeptide

SEQ ID NO: 77 - protein, 219 aa, Artificial Sequence; identical to SEQ ID NO: 33
  Description of Artificial Sequence: Synthetic polypeptide

SEQ ID NO: 78 - protein, 446 aa, Artificial Sequence; identical to SEQ ID NO: 41
  Description of Artificial Sequence: Synthetic polypeptide

SEQ ID NO: 79 - protein, 443 aa, Artificial Sequence
  Description of Artificial Sequence: Synthetic polypeptide
QVQLVESGGGVVQPGRSLRLDCKASGITFSNSGMHWVRQAPGKGLEWVAVIWYDGSKRYYADSVKGRFTISRDNSKNTLFLQMNSLRAEDTAVYYCATNDDYWGQGTLVTVSSASTKGPSVFPLAPSSKSTSGGTAALGCLVKDYFPEPVTVSWNSGALTSGVHTFPAVLQSSGLYSLSSVVTVPSSSLGTQTYICNVNHKPSNTKVDKKVEPKSCDKTHTCPPCPAPEAAGGPSVFLFPPKPKDTLMISRTPEVTCVVVDVSHEDPEVKFNWYVDGVEVHNAKTKPREEQYNSTYRVVSVLTVLHQDWLNGKEYKCKVSNKALPAPIEKTISKAKGQPREPQVYTLPPSRDELTKNQVSLWCLVKGFYPSDIAVEWESNGQPENNYKTTPPVLDSDGSFFLYSKLTVDKSRWQQGNVFSCSVMHEALHNHYTQKSLSLSPGK

SEQ ID NO: 80 - protein, 219 aa, Artificial Sequence; identical to SEQ ID NO: 33
  Description of Artificial Sequence: Synthetic polypeptide

SEQ ID NO: 81 - protein, 214 aa, Artificial Sequence; identical to SEQ ID NO: 64
  Description of Artificial Sequence: Synthetic polypeptide

SEQ ID NO: 82 - protein, 446 aa, Artificial Sequence; identical to SEQ ID NO: 41
  Description of Artificial Sequence: Synthetic polypeptide

SEQ ID NO: 83 - protein, 443 aa, Artificial Sequence; identical to SEQ ID NO: 79
  Description of Artificial Sequence: Synthetic polypeptide

SEQ ID NO: 84 - protein, 219 aa, Artificial Sequence; identical to SEQ ID NO: 33
  Description of Artificial Sequence: Synthetic polypeptide

SEQ ID NO: 85 - protein, 214 aa, Artificial Sequence; identical to SEQ ID NO: 64
  Description of Artificial Sequence: Synthetic polypeptide

SEQ ID NO: 86 - protein, 698 aa, Artificial Sequence
  Description of Artificial Sequence: Synthetic polypeptide
QVKLQQSGPELKKPGETVKISCKASGYTFTNYGMNWVKQAPGKGLKWMGWINTYTGESTYADDFKGRFAFSLETSASAAYLQINNLKNEDTATYFCARFAIKGDYWGQGTTVTVSSASTKGPSVFPLAPCSRSTSESTAALGCLVKDYFPEPVTVSWNSGALTSGVHTFPAVLQSSGLYSLSSVVTVPSSSLGTKTYTCNVDHKPSNTKVDKRVESKYGPPCPSCPAPEFLGGPSVFLFPPKPKDTLMISRTPEVTCVVVDVSQEDPEVQFNWYVDGVEVHNAKTKPREEQFNSTYRVVSVLTVLHQDWLNGKEYKCKVSNKGLPSSIEKTISKAKGQPREPQVYTLPPSQEEMTKNQVSLTCLVKGFYPSDIAVEWESNGQPENNYKTTPPVLDSDGSFFLYSRLTVDKSRWQEGNVFSCSVMHEALHNHYTQKSLSLSLGKGGGGAGGGGQVQLVQSGVEVKKPGASVKVSCKASGYTFTNYYMYWVRQAPGQGLEWMGGINPSNGGTNFNEKFKNRVTLTTDSSTTTAYMELKSLQFDDTAVYYCARRDYRFDMGFDYWGQGTTVTVSSGGGGSGGGGSGGGGSEIVLTQSPATLSLSPGERATLSCRASKGVSTSGYSYLHWYQQKPGQAPRLLIYLASYLESGVPARFSGSGSGTDFTLTISSLEPEDFAVYYCQHSRDLPLTFGGGTKVEIK

SEQ ID NO: 87 - protein, 219 aa, Artificial Sequence
  Description of Artificial Sequence: Synthetic polypeptide
DIVLTQSPFSNPVTLGTSASISCRSTKSLLHSNGITYLYWYLQKPGQSPQLLIYQMSNLASGVPDRFSSSGSGTDFTLRISRVEAEDVGVYYCAQNLEIPRTFGGGTKLEIKRTVAAPSVFIFPPSDEQLKSGTASVVCLLNNFYPREAKVQWKVDNALQSGNSQESVTEQDSKDSTYSLSSTLTLSKADYEKHKVYACEVTHQGLSSPVTKSFNRGEC

SEQ ID NO: 88 - protein, 698 aa, Artificial Sequence
  Description of Artificial Sequence: Synthetic polypeptide
QVKLQQSGPELKKPGETVKISCKASGYTFTNYGMNWVKQAPGKGLKWMGWINTYTGESTYADDFKGRFAFSLETSASAAYLQINNLKNEDTATYFCARFAIKGDYWGQGTTVTVSSASTKGPSVFPLAPCSRSTSESTAALGCLVKDYFPEPVTVSWNSGALTSGVHTFPAVLQSSGLYSLSSVVTVPSSSLGTKTYTCNVDHKPSNTKVDKRVESKYGPPCPSCPAPEFLGGPSVFLFPPKPKDTLMISRTPEVTCVVVDVSQEDPEVQFNWYVDGVEVHNAKTKPREEQFNSTYRVVSVLTVLHQDWLNGKEYKCKVSNKGLPSSIEKTISKAKGQPREPQVYTLPPSQEEMTKNQVSLTCLVKGFYPSDIAVEWESNGQPENNYKTTPPVLDSDGSFFLYSRLTVDKSRWQEGNVFSCSVMHEALHNHYTQKSLSLSLGKGGGGAGGGGEIVLTQSPATLSLSPGERATLSCRASKGVSTSGYSYLHWYQQKPGQAPRLLIYLASYLESGVPARFSGSGSGTDFTLTISSLEPEDFAVYYCQHSRDLPLTFGGGTKVEIKGGGGSGGGGSGGGGSQVQLVQSGVEVKKPGASVKVSCKASGYTFTNYYMYWVRQAPGQGLEWMGGINPSNGGTNFNEKFKNRVTLTTDSSTTTAYMELKSLQFDDTAVYYCARRDYRFDMGFDYWGQGTTVTVSS

SEQ ID NO: 89 - protein, 219 aa, Artificial Sequence; identical to SEQ ID NO: 87
  Description of Artificial Sequence: Synthetic polypeptide

SEQ ID NO: 90 - protein, 699 aa, Artificial Sequence
  Description of Artificial Sequence: Synthetic polypeptide
QVQLVQSGVEVKKPGASVKVSCKASGYTFTNYYMYWVRQAPGQGLEWMGGINPSNGGTNFNEKFKNRVTLTTDSSTTTAYMELKSLQFDDTAVYYCARRDYRFDMGFDYWGQGTTVTVSSASTKGPSVFPLAPCSRSTSESTAALGCLVKDYFPEPVTVSWNSGALTSGVHTFPAVLQSSGLYSLSSVVTVPSSSLGTKTYTCNVDHKPSNTKVDKRVESKYGPPCPSCPAPEFLGGPSVFLFPPKPKDTLMISRTPEVTCVVVDVSQEDPEVQFNWYVDGVEVHNAKTKPREEQFNSTYRVVSVLTVLHQDWLNGKEYKCKVSNKGLPSSIEKTISKAKGQPREPQVYTLPPSQEEMTKNQVSLTCLVKGFYPSDIAVEWESNGQPENNYKTTPPVLDSDGSFFLYSRLTVDKSRWQEGNVFSCSVMHEALHNHYTQKSLSLSLGKGGGGAGGGGQVKLQQSGPELKKPGETVKISCKASGYTFTNYGMNWVKQAPGKGLKWMGWINTYTGESTYADDFKGRFAFSLETSASAAYLQINNLKNEDTATYFCARFAIKGDYWGQGTTVTVSSGGGGSGGGGSGGGGSDIVLTQSPFSNPVTLGTSASISCRSTKSLLHSNGITYLYWYLQKPGQSPQLLIYQMSNLASGVPDRFSSSGSGTDFTLRISRVEAEDVGVYYCAQNLEIPRTFGGGTKLEIK

SEQ ID NO: 91 - protein, 218 aa, Artificial Sequence; identical to SEQ ID NO: 37
  Description of Artificial Sequence: Synthetic polypeptide

SEQ ID NO: 92 - protein, 699 aa, Artificial Sequence
  Description of Artificial Sequence: Synthetic polypeptide
QVQLVQSGVEVKKPGASVKVSCKASGYTFTNYYMYWVRQAPGQGLEWMGGINPSNGGTNFNEKFKNRVTLTTDSSTTTAYMELKSLQFDDTAVYYCARRDYRFDMGFDYWGQGTTVTVSSASTKGPSVFPLAPCSRSTSESTAALGCLVKDYFPEPVTVSWNSGALTSGVHTFPAVLQSSGLYSLSSVVTVPSSSLGTKTYTCNVDHKPSNTKVDKRVESKYGPPCPSCPAPEFLGGPSVFLFPPKPKDTLMISRTPEVTCVVVDVSQEDPEVQFNWYVDGVEVHNAKTKPREEQFNSTYRVVSVLTVLHQDWLNGKEYKCKVSNKGLPSSIEKTISKAKGQPREPQVYTLPPSQEEMTKNQVSLTCLVKGFYPSDIAVEWESNGQPENNYKTTPPVLDSDGSFFLYSRLTVDKSRWQEGNVFSCSVMHEALHNHYTQKSLSLSLGKGGGGAGGGGDIVLTQSPFSNPVTLGTSASISCRSTKSLLHSNGITYLYWYLQKPGQSPQLLIYQMSNLASGVPDRFSSSGSGTDFTLRISRVEAEDVGVYYCAQNLEIPRTFGGGTKLEIKGGGGSGGGGSGGGGSQVKLQQSGPELKKPGETVKISCKASGYTFTNYGMNWVKQAPGKGLKWMGWINTYTGESTYADDFKGRFAFSLETSASAAYLQINNLKNEDTATYFCARFAIKGDYWGQGTTVTVSS

SEQ ID NO: 93 - protein, 218 aa, Artificial Sequence; identical to SEQ ID NO: 37
  Description of Artificial Sequence: Synthetic polypeptide

SEQ ID NO: 94 - protein, 701 aa, Artificial Sequence
  Description of Artificial Sequence: Synthetic polypeptide
QVKLQQSGPELKKPGETVKISCKASGYTFTNYGMNWVKQAPGKGLKWMGWINTYTGESTYADDFKGRFAFSLETSASAAYLQINNLKNEDTATYFCARFAIKGDYWGQGTTVTVSSASTKGPSVFPLAPSSKSTSGGTAALGCLVKDYFPEPVTVSWNSGALTSGVHTFPAVLQSSGLYSLSSVVTVPSSSLGTQTYICNVNHKPSNTKVDKKVEPKSCDKTHTCPPCPAPEAAGGPSVFLFPPKPKDTLMISRTPEVTCVVVDVSHEDPEVKFNWYVDGVEVHNAKTKPREEQYNSTYRVVSVLTVLHQDWLNGKEYKCKVSNKALPAPIEKTISKAKGQPREPQVYTLPPSRDELTKNQVSLWCLVKGFYPSDIAVEWESNGQPENNYKTTPPVLDSDGSFFLYSKLTVDKSRWQQGNVFSCSVMHEALHNHYTQKSLSLSPGKGGGGAGGGGQVQLVQSGVEVKKPGASVKVSCKASGYTFTNYYMYWVRQAPGQGLEWMGGINPSNGGTNFNEKFKNRVTLTTDSSTTTAYMELKSLQFDDTAVYYCARRDYRFDMGFDYWGQGTTVTVSSGGGGSGGGGSGGGGSEIVLTQSPATLSLSPGERATLSCRASKGVSTSGYSYLHWYQQKPGQAPRLLIYLASYLESGVPARFSGSGSGTDFTLTISSLEPEDFAVYYCQHSRDLPLTFGGGTKVEIK

SEQ ID NO: 95 - protein, 446 aa, Artificial Sequence
  Description of Artificial Sequence: Synthetic polypeptide
QVKLQQSGPELKKPGETVKISCKASGYTFTNYGMNWVKQAPGKGLKWMGWINTYTGESTYADDFKGRFAFSLETSASAAYLQINNLKNEDTATYFCARFAIKGDYWGQGTTVTVSSASTKGPSVFPLAPSSKSTSGGTAALGCLVKDYFPEPVTVSWNSGALTSGVHTFPAVLQSSGLYSLSSVVTVPSSSLGTQTYICNVNHKPSNTKVDKKVEPKSCDKTHTCPPCPAPEAAGGPSVFLFPPKPKDTLMISRTPEVTCVVVDVSHEDPEVKFNWYVDGVEVHNAKTKPREEQYNSTYRVVSVLTVLHQDWLNGKEYKCKVSNKALPAPIEKTISKAKGQPREPQVYTLPPSRDELTKNQVSLWCLVKGFYPSDIAVEWESNGQPENNYKTTPPVLDSDGSFFLYSKLTVDKSRWQQGNVFSCSVMHEALHNHYTQKSLSLSPGK

SEQ ID NO: 96 - protein, 219 aa, Artificial Sequence; identical to SEQ ID NO: 87
  Description of Artificial Sequence: Synthetic polypeptide

SEQ ID NO: 97 - protein, 701 aa, Artificial Sequence
  Description of Artificial Sequence: Synthetic polypeptide
QVKLQQSGPELKKPGETVKISCKASGYTFTNYGMNWVKQAPGKGLKWMGWINTYTGESTYADDFKGRFAFSLETSASAAYLQINNLKNEDTATYFCARFAIKGDYWGQGTTVTVSSASTKGPSVFPLAPSSKSTSGGTAALGCLVKDYFPEPVTVSWNSGALTSGVHTFPAVLQSSGLYSLSSVVTVPSSSLGTQTYICNVNHKPSNTKVDKKVEPKSCDKTHTCPPCPAPEAAGGPSVFLFPPKPKDTLMISRTPEVTCVVVDVSHEDPEVKFNWYVDGVEVHNAKTKPREEQYNSTYRVVSVLTVLHQDWLNGKEYKCKVSNKALPAPIEKTISKAKGQPREPQVYTLPPSRDELTKNQVSLWCLVKGFYPSDIAVEWESNGQPENNYKTTPPVLDSDGSFFLYSKLTVDKSRWQQGNVFSCSVMHEALHNHYTQKSLSLSPGKGGGGAGGGGEIVLTQSPATLSLSPGERATLSCRASKGVSTSGYSYLHWYQQKPGQAPRLLIYLASYLESGVPARFSGSGSGTDFTLTISSLEPEDFAVYYCQHSRDLPLTFGGGTKVEIKGGGGSGGGGSGGGGSQVQLVQSGVEVKKPGASVKVSCKASGYTFTNYYMYWVRQAPGQGLEWMGGINPSNGGTNFNEKFKNRVTLTTDSSTTTAYMELKSLQFDDTAVYYCARRDYRFDMGFDYWGQGTTVTVSS

SEQ ID NO: 98 - protein, 219 aa, Artificial Sequence; identical to SEQ ID NO: 87
  Description of Artificial Sequence: Synthetic polypeptide

SEQ ID NO: 99 - protein, 701 aa, Artificial Sequence; identical to SEQ ID NO: 94
  Description of Artificial Sequence: Synthetic polypeptide

SEQ ID NO: 100 - protein, 446 aa, Artificial Sequence; identical to SEQ ID NO: 95
  Description of Artificial Sequence: Synthetic polypeptide

SEQ ID NO: 101 - protein, 219 aa, Artificial Sequence; identical to SEQ ID NO: 87
  Description of Artificial Sequence: Synthetic polypeptide

SEQ ID NO: 102 - protein, 701 aa, Artificial Sequence; identical to SEQ ID NO: 97
  Description of Artificial Sequence: Synthetic polypeptide

SEQ ID NO: 103 - protein, 446 aa, Artificial Sequence; identical to SEQ ID NO: 95
  Description of Artificial Sequence: Synthetic polypeptide

SEQ ID NO: 104 - protein, 219 aa, Artificial Sequence; identical to SEQ ID NO: 87
  Description of Artificial Sequence: Synthetic polypeptide

SEQ ID NO: 105 - protein, 446 aa, Artificial Sequence; identical to SEQ ID NO: 95
  Description of Artificial Sequence: Synthetic polypeptide

SEQ ID NO: 106 - protein, 450 aa, Artificial Sequence; identical to SEQ ID NO: 52
  Description of Artificial Sequence: Synthetic polypeptide

SEQ ID NO: 107 - protein, 219 aa, Artificial Sequence; identical to SEQ ID NO: 87
  Description of Artificial Sequence: Synthetic polypeptide

SEQ ID NO: 108 - protein, 218 aa, Artificial Sequence; identical to SEQ ID NO: 37
  Description of Artificial Sequence: Synthetic polypeptide

SEQ ID NO: 109 - protein, 446 aa, Artificial Sequence; identical to SEQ ID NO: 95
  Description of Artificial Sequence: Synthetic polypeptide

SEQ ID NO: 110 - protein, 450 aa, Artificial Sequence; identical to SEQ ID NO: 52
  Description of Artificial Sequence: Synthetic polypeptide

SEQ ID NO: 111 - protein, 219 aa, Artificial Sequence; identical to SEQ ID NO: 87
  Description of Artificial Sequence: Synthetic polypeptide

SEQ ID NO: 112 - protein, 218 aa, Artificial Sequence; identical to SEQ ID NO: 37
  Description of Artificial Sequence: Synthetic polypeptide

SEQ ID NO: 113 - protein, 687 aa, Artificial Sequence
  Description of Artificial Sequence: Synthetic polypeptide
QVKLQQSGPELKKPGETVKISCKASGYTFTNYGMNWVKQAPGKGLKWMGWINTYTGESTYADDFKGRFAFSLETSASAAYLQINNLKNEDTATYFCARFAIKGDYWGQGTTVTVSSASTKGPSVFPLAPCSRSTSESTAALGCLVKDYFPEPVTVSWNSGALTSGVHTFPAVLQSSGLYSLSSVVTVPSSSLGTKTYTCNVDHKPSNTKVDKRVESKYGPPCPSCPAPEFLGGPSVFLFPPKPKDTLMISRTPEVTCVVVDVSQEDPEVQFNWYVDGVEVHNAKTKPREEQFNSTYRVVSVLTVLHQDWLNGKEYKCKVSNKGLPSSIEKTISKAKGQPREPQVYTLPPSQEEMTKNQVSLTCLVKGFYPSDIAVEWESNGQPENNYKTTPPVLDSDGSFFLYSRLTVDKSRWQEGNVFSCSVMHEALHNHYTQKSLSLSLGKGGGGAGGGGQVQLVESGGGVVQPGRSLRLDCKASGITFSNSGMHWVRQAPGKGLEWVAVIWYDGSKRYYADSVKGRFTISRDNSKNTLFLQMNSLRAEDTAVYYCATNDDYWGQGTLVTVSSGGGGSGGGGSGGGGSEIVLTQSPATLSLSPGERATLSCRASQSVSSYLAWYQQKPGQAPRLLIYDASNRATGIPARFSGSGSGTDFTLTISSLEPEDFAVYYCQQSSNWPRTFGQGTKVEIK

SEQ ID NO: 114 - protein, 219 aa, Artificial Sequence; identical to SEQ ID NO: 87
  Description of Artificial Sequence: Synthetic polypeptide

SEQ ID NO: 115 - protein, 687 aa, Artificial Sequence
  Description of Artificial Sequence: Synthetic polypeptide
QVKLQQSGPELKKPGETVKISCKASGYTFTNYGMNWVKQAPGKGLKWMGWINTYTGESTYADDFKGRFAFSLETSASAAYLQINNLKNEDTATYFCARFAIKGDYWGQGTTVTVSSASTKGPSVFPLAPCSRSTSESTAALGCLVKDYFPEPVTVSWNSGALTSGVHTFPAVLQSSGLYSLSSVVTVPSSSLGTKTYTCNVDHKPSNTKVDKRVESKYGPPCPSCPAPEFLGGPSVFLFPPKPKDTLMISRTPEVTCVVVDVSQEDPEVQFNWYVDGVEVHNAKTKPREEQFNSTYRVVSVLTVLHQDWLNGKEYKCKVSNKGLPSSIEKTISKAKGQPREPQVYTLPPSQEEMTKNQVSLTCLVKGFYPSDIAVEWESNGQPENNYKTTPPVLDSDGSFFLYSRLTVDKSRWQEGNVFSCSVMHEALHNHYTQKSLSLSLGKGGGGAGGGGEIVLTQSPATLSLSPGERATLSCRASQSVSSYLAWYQQKPGQAPRLLIYDASNRATGIPARFSGSGSGTDFTLTISSLEPEDFAVYYCQQSSNWPRTFGQGTKVEIKGGGGSGGGGSGGGGSQVQLVESGGGVVQPGRSLRLDCKASGITFSNSGMHWVRQAPGKGLEWVAVIWYDGSKRYYADSVKGRFTISRDNSKNTLFLQMNSLRAEDTAVYYCATNDDYWGQGTLVTVSS

SEQ ID NO: 116 - protein, 219 aa, Artificial Sequence; identical to SEQ ID NO: 87
  Description of Artificial Sequence: Synthetic polypeptide

SEQ ID NO: 117 - protein, 692 aa, Artificial Sequence
  Description of Artificial Sequence: Synthetic polypeptide
QVQLVESGGGVVQPGRSLRLDCKASGITFSNSGMHWVRQAPGKGLEWVAVIWYDGSKRYYADSVKGRFTISRDNSKNTLFLQMNSLRAEDTAVYYCATNDDYWGQGTLVTVSSASTKGPSVFPLAPCSRSTSESTAALGCLVKDYFPEPVTVSWNSGALTSGVHTFPAVLQSSGLYSLSSVVTVPSSSLGTKTYTCNVDHKPSNTKVDKRVESKYGPPCPSCPAPEFLGGPSVFLFPPKPKDTLMISRTPEVTCVVVDVSQEDPEVQFNWYVDGVEVHNAKTKPREEQFNSTYRVVSVLTVLHQDWLNGKEYKCKVSNKGLPSSIEKTISKAKGQPREPQVYTLPPSQEEMTKNQVSLTCLVKGFYPSDIAVEWESNGQPENNYKTTPPVLDSDGSFFLYSRLTVDKSRWQEGNVFSCSVMHEALHNHYTQKSLSLSLGKGGGGAGGGGQVKLQQSGPELKKPGETVKISCKASGYTFTNYGMNWVKQAPGKGLKWMGWINTYTGESTYADDFKGRFAFSLETSASAAYLQINNLKNEDTATYFCARFAIKGDYWGQGTTVTVSSGGGGSGGGGSGGGGSDIVLTQSPFSNPVTLGTSASISCRSTKSLLHSNGITYLYWYLQKPGQSPQLLIYQMSNLASGVPDRFSSSGSGTDFTLRISRVEAEDVGVYYCAQNLEIPRTFGGGTKLEIK

SEQ ID NO: 118 - protein, 214 aa, Artificial Sequence; identical to SEQ ID NO: 64
  Description of Artificial Sequence: Synthetic polypeptide

SEQ ID NO: 119 - protein, 692 aa, Artificial Sequence
  Description of Artificial Sequence: Synthetic polypeptide
QVQLVESGGGVVQPGRSLRLDCKASGITFSNSGMHWVRQAPGKGLEWVAVIWYDGSKRYYADSVKGRFTISRDNSKNTLFLQMNSLRAEDTAVYYCATNDDYWGQGTLVTVSSASTKGPSVFPLAPCSRSTSESTAALGCLVKDYFPEPVTVSWNSGALTSGVHTFPAVLQSSGLYSLSSVVTVPSSSLGTKTYTCNVDHKPSNTKVDKRVESKYGPPCPSCPAPEFLGGPSVFLFPPKPKDTLMISRTPEVTCVVVDVSQEDPEVQFNWYVDGVEVHNAKTKPREEQFNSTYRVVSVLTVLHQDWLNGKEYKCKVSNKGLPSSIEKTISKAKGQPREPQVYTLPPSQEEMTKNQVSLTCLVKGFYPSDIAVEWESNGQPENNYKTTPPVLDSDGSFFLYSRLTVDKSRWQEGNVFSCSVMHEALHNHYTQKSLSLSLGKGGGGAGGGGDIVLTQSPFSNPVTLGTSASISCRSTKSLLHSNGITYLYWYLQKPGQSPQLLIYQMSNLASGVPDRFSSSGSGTDFTLRISRVEAEDVGVYYCAQNLEIPRTFGGGTKLEIKGGGGSGGGGSGGGGSQVKLQQSGPELKKPGETVKISCKASGYTFTNYGMNWVKQAPGKGLKWMGWINTYTGESTYADDFKGRFAFSLETSASAAYLQINNLKNEDTATYFCARFAIKGDYWGQGTTVTVSS

SEQ ID NO: 120 - protein, 214 aa, Artificial Sequence; identical to SEQ ID NO: 64
  Description of Artificial Sequence: Synthetic polypeptide

SEQ ID NO: 121 - protein, 690 aa, Artificial Sequence
  Description of Artificial Sequence: Synthetic polypeptide
QVKLQQSGPELKKPGETVKISCKASGYTFTNYGMNWVKQAPGKGLKWMGWINTYTGESTYADDFKGRFAFSLETSASAAYLQINNLKNEDTATYFCARFAIKGDYWGQGTTVTVSSASTKGPSVFPLAPSSKSTSGGTAALGCLVKDYFPEPVTVSWNSGALTSGVHTFPAVLQSSGLYSLSSVVTVPSSSLGTQTYICNVNHKPSNTKVDKKVEPKSCDKTHTCPPCPAPEAAGGPSVFLFPPKPKDTLMISRTPEVTCVVVDVSHEDPEVKFNWYVDGVEVHNAKTKPREEQYNSTYRVVSVLTVLHQDWLNGKEYKCKVSNKALPAPIEKTISKAKGQPREPQVYTLPPSRDELTKNQVSLWCLVKGFYPSDIAVEWESNGQPENNYKTTPPVLDSDGSFFLYSKLTVDKSRWQQGNVFSCSVMHEALHNHYTQKSLSLSPGKGGGGAGGGGQVQLVESGGGVVQPGRSLRLDCKASGITFSNSGMHWVRQAPGKGLEWVAVIWYDGSKRYYADSVKGRFTISRDNSKNTLFLQMNSLRAEDTAVYYCATNDDYWGQGTLVTVSSGGGGSGGGGSGGGGSEIVLTQSPATLSLSPGERATLSCRASQSVSSYLAWYQQKPGQAPRLLIYDASNRATGIPARFSGSGSGTDFTLTISSLEPEDFAVYYCQQSSNWPRTFGQGTKVEIK

SEQ ID NO: 122 - protein, 446 aa, Artificial Sequence; identical to SEQ ID NO: 95
  Description of Artificial Sequence: Synthetic polypeptide

SEQ ID NO: 123 - protein, 219 aa, Artificial Sequence; identical to SEQ ID NO: 87
  Description of Artificial Sequence: Synthetic polypeptide

SEQ ID NO: 124 - protein, 690 aa, Artificial Sequence
  Description of Artificial Sequence: Synthetic polypeptide
QVKLQQSGPELKKPGETVKISCKASGYTFTNYGMNWVKQAPGKGLKWMGWINTYTGESTYADDFKGRFAFSLETSASAAYLQINNLKNEDTATYFCARFAIKGDYWGQGTTVTVSSASTKGPSVFPLAPSSKSTSGGTAALGCLVKDYFPEPVTVSWNSGALTSGVHTFPAVLQSSGLYSLSSVVTVPSSSLGTQTYICNVNHKPSNTKVDKKVEPKSCDKTHTCPPCPAPEAAGGPSVFLFPPKPKDTLMISRTPEVTCVVVDVSHEDPEVKFNWYVDGVEVHNAKTKPREEQYNSTYRVVSVLTVLHQDWLNGKEYKCKVSNKALPAPIEKTISKAKGQPREPQVYTLPPSRDELTKNQVSLWCLVKGFYPSDIAVEWESNGQPENNYKTTPPVLDSDGSFFLYSKLTVDKSRWQQGNVFSCSVMHEALHNHYTQKSLSLSPGKGGGGAGGGGEIVLTQSPATLSLSPGERATLSCRASQSVSSYLAWYQQKPGQAPRLLIYDASNRATGIPARFSGSGSGTDFTLTISSLEPEDFAVYYCQQSSNWPRTFGQGTKVEIKGGGGSGGGGSGGGGSQVQLVESGGGVVQPGRSLRLDCKASGITFSNSGMHWVRQAPGKGLEWVAVIWYDGSKRYYADSVKGRFTISRDNSKNTLFLQMNSLRAEDTAVYYCATNDDYWGQGTLVTVSS

SEQ ID NO: 125 - protein, 219 aa, Artificial Sequence; identical to SEQ ID NO: 87
  Description of Artificial Sequence: Synthetic polypeptide

SEQ ID NO: 126 - protein, 690 aa, Artificial Sequence; identical to SEQ ID NO: 121
  Description of Artificial Sequence: Synthetic polypeptide

SEQ ID NO: 127 - protein, 446 aa, Artificial Sequence; identical to SEQ ID NO: 95
  Description of Artificial Sequence: Synthetic polypeptide

SEQ ID NO: 128 - protein, 219 aa, Artificial Sequence; identical to SEQ ID NO: 87
  Description of Artificial Sequence: Synthetic polypeptide

SEQ ID NO: 129 - protein, 690 aa, Artificial Sequence; identical to SEQ ID NO: 124
  Description of Artificial Sequence: Synthetic polypeptide

SEQ ID NO: 130 - protein, 446 aa, Artificial Sequence; identical to SEQ ID NO: 95
  Description of Artificial Sequence: Synthetic polypeptide

SEQ ID NO: 131 - protein, 219 aa, Artificial Sequence; identical to SEQ ID NO: 87
  Description of Artificial Sequence: Synthetic polypeptide

SEQ ID NO: 132 - protein, 446 aa, Artificial Sequence; identical to SEQ ID NO: 95
  Description of Artificial Sequence: Synthetic polypeptide

SEQ ID NO: 133 - protein, 443 aa, Artificial Sequence; identical to SEQ ID NO: 79
  Description of Artificial Sequence: Synthetic polypeptide

SEQ ID NO: 134 - protein, 219 aa, Artificial Sequence; identical to SEQ ID NO: 87
  Description of Artificial Sequence: Synthetic polypeptide

SEQ ID NO: 135 - protein, 214 aa, Artificial Sequence; identical to SEQ ID NO: 64
  Description of Artificial Sequence: Synthetic polypeptide

SEQ ID NO: 136 - protein, 446 aa, Artificial Sequence; identical to SEQ ID NO: 95
  Description of Artificial Sequence: Synthetic polypeptide

SEQ ID NO: 137 - protein, 443 aa, Artificial Sequence; identical to SEQ ID NO: 79
  Description of Artificial Sequence: Synthetic polypeptide

SEQ ID NO: 138 - protein, 219 aa, Artificial Sequence; identical to SEQ ID NO: 87
  Description of Artificial Sequence: Synthetic polypeptide

SEQ ID NO: 139 - protein, 214 aa, Artificial Sequence; identical to SEQ ID NO: 64
  Description of Artificial Sequence: Synthetic polypeptide

SEQ ID NO: 140 - protein, 709 aa, Artificial Sequence
  Description of Artificial Sequence: Synthetic polypeptide
EVQLLESGGGVVQPGRSLRLSCAASGFTFSSYGMHWVRQAPGKGLEWVAVISYDGSNKYYADSVKGRFTISRDNSKNTLYLQMNSLRAEDTAVYYCAKDMGWGSGWRPYYYYGMDVWGQGTTVTVSSASTKGPSVFPLAPCSRSTSESTAALGCLVKDYFPEPVTVSWNSGALTSGVHTFPAVLQSSGLYSLSSVVTVPSSSLGTKTYTCNVDHKPSNTKVDKRVESKYGPPCPSCPAPEFLGGPSVFLFPPKPKDTLMISRTPEVTCVVVDVSQEDPEVQFNWYVDGVEVHNAKTKPREEQFNSTYRVVSVLTVLHQDWLNGKEYKCKVSNKGLPSSIEKTISKAKGQPREPQVYTLPPSQEEMTKNQVSLTCLVKGFYPSDIAVEWESNGQPENNYKTTPPVLDSDGSFFLYSRLTVDKSRWQEGNVFSCSVMHEALHNHYTQKSLSLSLGKGGGGAGGGGQVQLVQSGVEVKKPGASVKVSCKASGYTFTNYYMYWVRQAPGQGLEWMGGINPSNGGTNFNEKFKNRVTLTTDSSTTTAYMELKSLQFDDTAVYYCARRDYRFDMGFDYWGQGTTVTVSSGGGGSGGGGSGGGGSEIVLTQSPATLSLSPGERATLSCRASKGVSTSGYSYLHWYQQKPGQAPRLLIYLASYLESGVPARFSGSGSGTDFTLTISSLEPEDFAVYYCQHSRDLPLTFGGGTKVEIK

SEQ ID NO: 141 - protein, 214 aa, Artificial Sequence
  Description of Artificial Sequence: Synthetic polypeptide
ELQMTQSPSSLSASVGDRVTITCRTSQSISSYLNWYQQKPGQPPKLLIYWASTRESGVPDRFSGSGSGTDFTLTISSLQPEDSATYYCQQSYDIPYTFGQGTKLEIKRTVAAPSVFIFPPSDEQLKSGTASVVCLLNNFYPREAKVQWKVDNALQSGNSQESVTEQDSKDSTYSLSSTLTLSKADYEKHKVYACEVTHQGLSSPVTKSFNRGEC

SEQ ID NO: 142 - protein, 709 aa, Artificial Sequence
  Description of Artificial Sequence: Synthetic polypeptide
EVQLLESGGGVVQPGRSLRLSCAASGFTFSSYGMHWVRQAPGKGLEWVAVISYDGSNKYYADSVKGRFTISRDNSKNTLYLQMNSLRAEDTAVYYCAKDMGWGSGWRPYYYYGMDVWGQGTTVTVSSASTKGPSVFPLAPCSRSTSESTAALGCLVKDYFPEPVTVSWNSGALTSGVHTFPAVLQSSGLYSLSSVVTVPSSSLGTKTYTCNVDHKPSNTKVDKRVESKYGPPCPSCPAPEFLGGPSVFLFPPKPKDTLMISRTPEVTCVVVDVSQEDPEVQFNWYVDGVEVHNAKTKPREEQFNSTYRVVSVLTVLHQDWLNGKEYKCKVSNKGLPSSIEKTISKAKGQPREPQVYTLPPSQEEMTKNQVSLTCLVKGFYPSDIAVEWESNGQPENNYKTTPPVLDSDGSFFLYSRLTVDKSRWQEGNVFSCSVMHEALHNHYTQKSLSLSLGKGGGGAGGGGEIVLTQSPATLSLSPGERATLSCRASKGVSTSGYSYLHWYQQKPGQAPRLLIYLASYLESGVPARFSGSGSGTDFTLTISSLEPEDFAVYYCQHSRDLPLTFGGGTKVEIKGGGGSGGGGSGGGGSQVQLVQSGVEVKKPGASVKVSCKASGYTFTNYYMYWVRQAPGQGLEWMGGINPSNGGTNFNEKFKNRVTLTTDSSTTTAYMELKSLQFDDTAVYYCARRDYRFDMGFDYWGQGTTVTVSS

SEQ ID NO: 143 - protein, 214 aa, Artificial Sequence; identical to SEQ ID NO: 141
  Description of Artificial Sequence: Synthetic polypeptide

SEQ ID NO: 144 - protein, 705 aa, Artificial Sequence
  Description of Artificial Sequence: Synthetic polypeptide
QVQLVQSGVEVKKPGASVKVSCKASGYTFTNYYMYWVRQAPGQGLEWMGGINPSNGGTNFNEKFKNRVTLTTDSSTTTAYMELKSLQFDDTAVYYCARRDYRFDMGFDYWGQGTTVTVSSASTKGPSVFPLAPCSRSTSESTAALGCLVKDYFPEPVTVSWNSGALTSGVHTFPAVLQSSGLYSLSSVVTVPSSSLGTKTYTCNVDHKPSNTKVDKRVESKYGPPCPSCPAPEFLGGPSVFLFPPKPKDTLMISRTPEVTCVVVDVSQEDPEVQFNWYVDGVEVHNAKTKPREEQFNSTYRVVSVLTVLHQDWLNGKEYKCKVSNKGLPSSIEKTISKAKGQPREPQVYTLPPSQEEMTKNQVSLTCLVKGFYPSDIAVEWESNGQPENNYKTTPPVLDSDGSFFLYSRLTVDKSRWQEGNVFSCSVMHEALHNHYTQKSLSLSLGKGGGGAGGGGEVQLLESGGGVVQPGRSLRLSCAASGFTFSSYGMHWVRQAPGKGLEWVAVISYDGSNKYYADSVKGRFTISRDNSKNTLYLQMNSLRAEDTAVYYCAKDMGWGSGWRPYYYYGMDVWGQGTTVTVSSGGGGSGGGGSGGGGSELQMTQSPSSLSASVGDRVTITCRTSQSISSYLNWYQQKPGQPPKLLIYWASTRESGVPDRFSGSGSGTDFTLTISSLQPEDSATYYCQQSYDIPYTFGQGTKLEIK

SEQ ID NO: 145 - protein, 218 aa, Artificial Sequence; identical to SEQ ID NO: 37
  Description of Artificial Sequence: Synthetic polypeptide

SEQ ID NO: 146 - protein, 705 aa, Artificial Sequence
  Description of Artificial Sequence: Synthetic polypeptide
QVQLVQSGVEVKKPGASVKVSCKASGYTFTNYYMYWVRQAPGQGLEWMGGINPSNGGTNFNEKFKNRVTLTTDSSTTTAYMELKSLQFDDTAVYYCARRDYRFDMGFDYWGQGTTVTVSSASTKGPSVFPLAPCSRSTSESTAALGCLVKDYFPEPVTVSWNSGALTSGVHTFPAVLQSSGLYSLSSVVTVPSSSLGTKTYTCNVDHKPSNTKVDKRVESKYGPPCPSCPAPEFLGGPSVFLFPPKPKDTLMISRTPEVTCVVVDVSQEDPEVQFNWYVDGVEVHNAKTKPREEQFNSTYRVVSVLTVLHQDWLNGKEYKCKVSNKGLPSSIEKTISKAKGQPREPQVYTLPPSQEEMTKNQVSLTCLVKGFYPSDIAVEWESNGQPENNYKTTPPVLDSDGSFFLYSRLTVDKSRWQEGNVFSCSVMHEALHNHYTQKSLSLSLGKGGGGAGGGGELQMTQSPSSLSASVGDRVTITCRTSQSISSYLNWYQQKPGQPPKLLIYWASTRESGVPDRFSGSGSGTDFTLTISSLQPEDSATYYCQQSYDIPYTFGQGTKLEIKGGGGSGGGGSGGGGSEVQLLESGGGVVQPGRSLRLSCAASGFTFSSYGMHWVRQAPGKGLEWVAVISYDGSNKYYADSVKGRFTISRDNSKNTLYLQMNSLRAEDTAVYYCAKDMGWGSGWRPYYYYGMDVWGQGTTVTVSS

SEQ ID NO: 147 - protein, 218 aa, Artificial Sequence; identical to SEQ ID NO: 37
  Description of Artificial Sequence: Synthetic polypeptide

SEQ ID NO: 148 - protein, 712 aa, Artificial Sequence
  Description of Artificial Sequence: Synthetic polypeptide
EVQLLESGGGVVQPGRSLRLSCAASGFTFSSYGMHWVRQAPGKGLEWVAVISYDGSNKYYADSVKGRFTISRDNSKNTLYLQMNSLRAEDTAVYYCAKDMGWGSGWRPYYYYGMDVWGQGTTVTVSSASTKGPSVFPLAPSSKSTSGGTAALGCLVKDYFPEPVTVSWNSGALTSGVHTFPAVLQSSGLYSLSSVVTVPSSSLGTQTYICNVNHKPSNTKVDKKVEPKSCDKTHTCPPCPAPEAAGGPSVFLFPPKPKDTLMISRTPEVTCVVVDVSHEDPEVKFNWYVDGVEVHNAKTKPREEQYNSTYRVVSVLTVLHQDWLNGKEYKCKVSNKALPAPIEKTISKAKGQPREPQVYTLPPSRDELTKNQVSLWCLVKGFYPSDIAVEWESNGQPENNYKTTPPVLDSDGSFFLYSKLTVDKSRWQQGNVFSCSVMHEALHNHYTQKSLSLSPGKGGGGAGGGGQVQLVQSGVEVKKPGASVKVSCKASGYTFTNYYMYWVRQAPGQGLEWMGGINPSNGGTNFNEKFKNRVTLTTDSSTTTAYMELKSLQFDDTAVYYCARRDYRFDMGFDYWGQGTTVTVSSGGGGSGGGGSGGGGSEIVLTQSPATLSLSPGERATLSCRASKGVSTSGYSYLHWYQQKPGQAPRLLIYLASYLESGVPARFSGSGSGTDFTLTISSLEPEDFAVYYCQHSRDLPLTFGGGTKVEIK

SEQ ID NO: 149 - protein, 457 aa, Artificial Sequence
  Description of Artificial Sequence: Synthetic polypeptide
EVQLLESGGGVVQPGRSLRLSCAASGFTFSSYGMHWVRQAPGKGLEWVAVISYDGSNKYYADSVKGRFTISRDNSKNTLYLQMNSLRAEDTAVYYCAKDMGWGSGWRPYYYYGMDVWGQGTTVTVSSASTKGPSVFPLAPSSKSTSGGTAALGCLVKDYFPEPVTVSWNSGALTSGVHTFPAVLQSSGLYSLSSVVTVPSSSLGTQTYICNVNHKPSNTKVDKKVEPKSCDKTHTCPPCPAPEAAGGPSVFLFPPKPKDTLMISRTPEVTCVVVDVSHEDPEVKFNWYVDGVEVHNAKTKPREEQYNSTYRVVSVLTVLHQDWLNGKEYKCKVSNKALPAPIEKTISKAKGQPREPQVYTLPPSRDELTKNQVSLWCLVKGFYPSDIAVEWESNGQPENNYKTTPPVLDSDGSFFLYSKLTVDKSRWQQGNVFSCSVMHEALHNHYTQKSLSLSPGK

SEQ ID NO: 150 - protein, 214 aa, Artificial Sequence; identical to SEQ ID NO: 141
  Description of Artificial Sequence: Synthetic polypeptide

SEQ ID NO: 151 - protein, 712 aa, Artificial Sequence
  Description of Artificial Sequence: Synthetic polypeptide
EVQLLESGGGVVQPGRSLRLSCAASGFTFSSYGMHWVRQAPGKGLEWVAVISYDGSNKYYADSVKGRFTISRDNSKNTLYLQMNSLRAEDTAVYYCAKDMGWGSGWRPYYYYGMDVWGQGTTVTVSSASTKGPSVFPLAPSSKSTSGGTAALGCLVKDYFPEPVTVSWNSGALTSGVHTFPAVLQSSGLYSLSSVVTVPSSSLGTQTYICNVNHKPSNTKVDKKVEPKSCDKTHTCPPCPAPEAAGGPSVFLFPPKPKDTLMISRTPEVTCVVVDVSHEDPEVKFNWYVDGVEVHNAKTKPREEQYNSTYRVVSVLTVLHQDWLNGKEYKCKVSNKALPAPIEKTISKAKGQPREPQVYTLPPSRDELTKNQVSLWCLVKGFYPSDIAVEWESNGQPENNYKTTPPVLDSDGSFFLYSKLTVDKSRWQQGNVFSCSVMHEALHNHYTQKSLSLSPGKGGGGAGGGGEIVLTQSPATLSLSPGERATLSCRASKGVSTSGYSYLHWYQQKPGQAPRLLIYLASYLESGVPARFSGSGSGTDFTLTISSLEPEDFAVYYCQHSRDLPLTFGGGTKVEIKGGGGSGGGGSGGGGSQVQLVQSGVEVKKPGASVKVSCKASGYTFTNYYMYWVRQAPGQGLEWMGGINPSNGGTNFNEKFKNRVTLTTDSSTTTAYMELKSLQFDDTAVYYCARRDYRFDMGFDYWGQGTTVTVSS

SEQ ID NO: 152 - protein, 214 aa, Artificial Sequence; identical to SEQ ID NO: 141
  Description of Artificial Sequence: Synthetic polypeptide

SEQ ID NO: 153 - protein, 712 aa, Artificial Sequence; identical to SEQ ID NO: 148
  Description of Artificial Sequence: Synthetic polypeptide

SEQ ID NO: 154 - protein, 457 aa, Artificial Sequence; identical to SEQ ID NO: 149
  Description of Artificial Sequence: Synthetic polypeptide

SEQ ID NO: 155 - protein, 214 aa, Artificial Sequence; identical to SEQ ID NO: 141
  Description of Artificial Sequence: Synthetic polypeptide

SEQ ID NO: 156 - protein, 712 aa, Artificial Sequence; identical to SEQ ID NO: 151
  Description of Artificial Sequence: Synthetic polypeptide

SEQ ID NO: 157 - protein, 457 aa, Artificial Sequence; identical to SEQ ID NO: 149
  Description of Artificial Sequence: Synthetic polypeptide

SEQ ID NO: 158 - protein, 214 aa, Artificial Sequence; identical to SEQ ID NO: 141
  Description of Artificial Sequence: Synthetic polypeptide

SEQ ID NO: 159 - protein, 457 aa, Artificial Sequence; identical to SEQ ID NO: 149
  Description of Artificial Sequence: Synthetic polypeptide

SEQ ID NO: 160 - protein, 450 aa, Artificial Sequence; identical to SEQ ID NO: 52
  Description of Artificial Sequence: Synthetic polypeptide

SEQ ID NO: 161 - protein, 214 aa, Artificial Sequence; identical to SEQ ID NO: 141
  Description of Artificial Sequence: Synthetic polypeptide

SEQ ID NO: 162 - protein, 218 aa, Artificial Sequence; identical to SEQ ID NO: 37
  Description of Artificial Sequence: Synthetic polypeptide

SEQ ID NO: 163 - protein, 457 aa, Artificial Sequence; identical to SEQ ID NO: 149
  Description of Artificial Sequence: Synthetic polypeptide

SEQ ID NO: 164 - protein, 450 aa, Artificial Sequence; identical to SEQ ID NO: 52
  Description of Artificial Sequence: Synthetic polypeptide

SEQ ID NO: 165 - protein, 214 aa, Artificial Sequence; identical to SEQ ID NO: 141
  Description of Artificial Sequence: Synthetic polypeptide

SEQ ID NO: 166 - protein, 218 aa, Artificial Sequence; identical to SEQ ID NO: 37
  Description of Artificial Sequence: Synthetic polypeptide

SEQ ID NO: 167 - protein, 698 aa, Artificial Sequence
  Description of Artificial Sequence: Synthetic polypeptide
EVQLLESGGGVVQPGRSLRLSCAASGFTFSSYGMHWVRQAPGKGLEWVAVISYDGSNKYYADSVKGRFTISRDNSKNTLYLQMNSLRAEDTAVYYCAKDMGWGSGWRPYYYYGMDVWGQGTTVTVSSASTKGPSVFPLAPCSRSTSESTAALGCLVKDYFPEPVTVSWNSGALTSGVHTFPAVLQSSGLYSLSSVVTVPSSSLGTKTYTCNVDHKPSNTKVDKRVESKYGPPCPSCPAPEFLGGPSVFLFPPKPKDTLMISRTPEVTCVVVDVSQEDPEVQFNWYVDGVEVHNAKTKPREEQFNSTYRVVSVLTVLHQDWLNGKEYKCKVSNKGLPSSIEKTISKAKGQPREPQVYTLPPSQEEMTKNQVSLTCLVKGFYPSDIAVEWESNGQPENNYKTTPPVLDSDGSFFLYSRLTVDKSRWQEGNVFSCSVMHEALHNHYTQKSLSLSLGKGGGGAGGGGQVQLVESGGGVVQPGRSLRLDCKASGITFSNSGMHWVRQAPGKGLEWVAVIWYDGSKRYYADSVKGRFTISRDNSKNTLFLQMNSLRAEDTAVYYCATNDDYWGQGTLVTVSSGGGGSGGGGSGGGGSEIVLTQSPATLSLSPGERATLSCRASQSVSSYLAWYQQKPGQAPRLLIYDASNRATGIPARFSGSGSGTDFTLTISSLEPEDFAVYYCQQSSNWPRTFGQGTKVEIK

SEQ ID NO: 168 - protein, 214 aa, Artificial Sequence; identical to SEQ ID NO: 141
  Description of Artificial Sequence: Synthetic polypeptide

SEQ ID NO: 169 - protein, 698 aa, Artificial Sequence
  Description of Artificial Sequence: Synthetic polypeptide
EVQLLESGGGVVQPGRSLRLSCAASGFTFSSYGMHWVRQAPGKGLEWVAVISYDGSNKYYADSVKGRFTISRDNSKNTLYLQMNSLRAEDTAVYYCAKDMGWGSGWRPYYYYGMDVWGQGTTVTVSSASTKGPSVFPLAPCSRSTSESTAALGCLVKDYFPEPVTVSWNSGALTSGVHTFPAVLQSSGLYSLSSVVTVPSSSLGTKTYTCNVDHKPSNTKVDKRVESKYGPPCPSCPAPEFLGGPSVFLFPPKPKDTLMISRTPEVTCVVVDVSQEDPEVQFNWYVDGVEVHNAKTKPREEQFNSTYRVVSVLTVLHQDWLNGKEYKCKVSNKGLPSSIEKTISKAKGQPREPQVYTLPPSQEEMTKNQVSLTCLVKGFYPSDIAVEWESNGQPENNYKTTPPVLDSDGSFFLYSRLTVDKSRWQEGNVFSCSVMHEALHNHYTQKSLSLSLGKGGGGAGGGGEIVLTQSPATLSLSPGERATLSCRASQSVSSYLAWYQQKPGQAPRLLIYDASNRATGIPARFSGSGSGTDFTLTISSLEPEDFAVYYCQQSSNWPRTFGQGTKVEIKGGGGSGGGGSGGGGSQVQLVESGGGVVQPGRSLRLDCKASGITFSNSGMHWVRQAPGKGLEWVAVIWYDGSKRYYADSVKGRFTISRDNSKNTLFLQMNSLRAEDTAVYYCATNDDYWGQGTLVTVSS

SEQ ID NO: 170 - protein, 214 aa, Artificial Sequence; identical to SEQ ID NO: 141
  Description of Artificial Sequence: Synthetic polypeptide

SEQ ID NO: 171 - protein, 698 aa, Artificial Sequence
  Description of Artificial Sequence: Synthetic polypeptide
QVQLVESGGGVVQPGRSLRLDCKASGITFSNSGMHWVRQAPGKGLEWVAVIWYDGSKRYYADSVKGRFTISRDNSKNTLFLQMNSLRAEDTAVYYCATNDDYWGQGTLVTVSSASTKGPSVFPLAPCSRSTSESTAALGCLVKDYFPEPVTVSWNSGALTSGVHTFPAVLQSSGLYSLSSVVTVPSSSLGTKTYTCNVDHKPSNTKVDKRVESKYGPPCPSCPAPEFLGGPSVFLFPPKPKDTLMISRTPEVTCVVVDVSQEDPEVQFNWYVDGVEVHNAKTKPREEQFNSTYRVVSVLTVLHQDWLNGKEYKCKVSNKGLPSSIEKTISKAKGQPREPQVYTLPPSQEEMTKNQVSLTCLVKGFYPSDIAVEWESNGQPENNYKTTPPVLDSDGSFFLYSRLTVDKSRWQEGNVFSCSVMHEALHNHYTQKSLSLSLGKGGGGAGGGGEVQLLESGGGVVQPGRSLRLSCAASGFTFSSYGMHWVRQAPGKGLEWVAVISYDGSNKYYADSVKGRFTISRDNSKNTLYLQMNSLRAEDTAVYYCAKDMGWGSGWRPYYYYGMDVWGQGTTVTVSSGGGGSGGGGSGGGGSELQMTQSPSSLSASVGDRVTITCRTSQSISSYLNWYQQKPGQPPKLLIYWASTRESGVPDRFSGSGSGTDFTLTISSLQPEDSATYYCQQSYDIPYTFGQGTKLEIK

SEQ ID NO: 172 - protein, 214 aa, Artificial Sequence; identical to SEQ ID NO: 64
  Description of Artificial Sequence: Synthetic polypeptide

SEQ ID NO: 173 - protein, 698 aa, Artificial Sequence
  Description of Artificial Sequence: Synthetic polypeptide
QVQLVESGGGVVQPGRSLRLDCKASGITFSNSGMHWVRQAPGKGLEWVAVIWYDGSKRYYADSVKGRFTISRDNSKNTLFLQMNSLRAEDTAVYYCATNDDYWGQGTLVTVSSASTKGPSVFPLAPCSRSTSESTAALGCLVKDYFPEPVTVSWNSGALTSGVHTFPAVLQSSGLYSLSSVVTVPSSSLGTKTYTCNVDHKPSNTKVDKRVESKYGPPCPSCPAPEFLGGPSVFLFPPKPKDTLMISRTPEVTCVVVDVSQEDPEVQFNWYVDGVEVHNAKTKPREEQFNSTYRVVSVLTVLHQDWLNGKEYKCKVSNKGLPSSIEKTISKAKGQPREPQVYTLPPSQEEMTKNQVSLTCLVKGFYPSDIAVEWESNGQPENNYKTTPPVLDSDGSFFLYSRLTVDKSRWQEGNVFSCSVMHEALHNHYTQKSLSLSLGKGGGGAGGGGELQMTQSPSSLSASVGDRVTITCRTSQSISSYLNWYQQKPGQPPKLLIYWASTRESGVPDRFSGSGSGTDFTLTISSLQPEDSATYYCQQSYDIPYTFGQGTKLEIKGGGGSGGGGSGGGGSEVQLLESGGGVVQPGRSLRLSCAASGFTFSSYGMHWVRQAPGKGLEWVAVISYDGSNKYYADSVKGRFTISRDNSKNTLYLQMNSLRAEDTAVYYCAKDMGWGSGWRPYYYYGMDVWGQGTTVTVSS

SEQ ID NO: 174 - protein, 214 aa, Artificial Sequence; identical to SEQ ID NO: 64
  Description of Artificial Sequence: Synthetic polypeptide

SEQ ID NO: 175 - protein, 701 aa, Artificial Sequence
  Description of Artificial Sequence: Synthetic polypeptide
EVQLLESGGGVVQPGRSLRLSCAASGFTFSSYGMHWVRQAPGKGLEWVAVISYDGSNKYYADSVKGRFTISRDNSKNTLYLQMNSLRAEDTAVYYCAKDMGWGSGWRPYYYYGMDVWGQGTTVTVSSASTKGPSVFPLAPSSKSTSGGTAALGCLVKDYFPEPVTVSWNSGALTSGVHTFPAVLQSSGLYSLSSVVTVPSSSLGTQTYICNVNHKPSNTKVDKKVEPKSCDKTHTCPPCPAPEAAGGPSVFLFPPKPKDTLMISRTPEVTCVVVDVSHEDPEVKFNWYVDGVEVHNAKTKPREEQYNSTYRVVSVLTVLHQDWLNGKEYKCKVSNKALPAPIEKTISKAKGQPREPQVYTLPPSRDELTKNQVSLWCLVKGFYPSDIAVEWESNGQPENNYKTTPPVLDSDGSFFLYSKLTVDKSRWQQGNVFSCSVMHEALHNHYTQKSLSLSPGKGGGGAGGGGQVQLVESGGGVVQPGRSLRLDCKASGITFSNSGMHWVRQAPGKGLEWVAVIWYDGSKRYYADSVKGRFTISRDNSKNTLFLQMNSLRAEDTAVYYCATNDDYWGQGTLVTVSSGGGGSGGGGSGGGGSEIVLTQSPATLSLSPGERATLSCRASQSVSSYLAWYQQKPGQAPRLLIYDASNRATGIPARFSGSGSGTDFTLTISSLEPEDFAVYYCQQSSNWPRTFGQGTKVEIK

SEQ ID NO: 176 - protein, 457 aa, Artificial Sequence; identical to SEQ ID NO: 149
  Description of Artificial Sequence: Synthetic polypeptide

SEQ ID NO: 177 - protein, 214 aa, Artificial Sequence; identical to SEQ ID NO: 141
  Description of Artificial Sequence: Synthetic polypeptide

SEQ ID NO: 178 - protein, 701 aa, Artificial Sequence
  Description of Artificial Sequence: Synthetic polypeptide
EVQLLESGGGVVQPGRSLRLSCAASGFTFSSYGMHWVRQAPGKGLEWVAVISYDGSNKYYADSVKGRFTISRDNSKNTLYLQMNSLRAEDTAVYYCAKDMGWGSGWRPYYYYGMDVWGQGTTVTVSSASTKGPSVFPLAPSSKSTSGGTAALGCLVKDYFPEPVTVSWNSGALTSGVHTFPAVLQSSGLYSLSSVVTVPSSSLGTQTYICNVNHKPSNTKVDKKVEPKSCDKTHTCPPCPAPEAAGGPSVFLFPPKPKDTLMISRTPEVTCVVVDVSHEDPEVKFNWYVDGVEVHNAKTKPREEQYNSTYRVVSVLTVLHQDWLNGKEYKCKVSNKALPAPIEKTISKAKGQPREPQVYTLPPSRDELTKNQVSLWCLVKGFYPSDIAVEWESNGQPENNYKTTPPVLDSDGSFFLYSKLTVDKSRWQQGNVFSCSVMHEALHNHYTQKSLSLSPGKGGGGAGGGGEIVLTQSPATLSLSPGERATLSCRASQSVSSYLAWYQQKPGQAPRLLIYDASNRATGIPARFSGSGSGTDFTLTISSLEPEDFAVYYCQQSSNWPRTFGQGTKVEIKGGGGSGGGGSGGGGSQVQLVESGGGVVQPGRSLRLDCKASGITFSNSGMHWVRQAPGKGLEWVAVIWYDGSKRYYADSVKGRFTISRDNSKNTLFLQMNSLRAEDTAVYYCATNDDYWGQGTLVTVSS

SEQ ID NO: 179 - protein, 214 aa, Artificial Sequence; identical to SEQ ID NO: 141
  Description of Artificial Sequence: Synthetic polypeptide

SEQ ID NO: 180 - protein, 701 aa, Artificial Sequence; identical to SEQ ID NO: 175
  Description of Artificial Sequence: Synthetic polypeptide

SEQ ID NO: 181 - protein, 457 aa, Artificial Sequence; identical to SEQ ID NO: 149
  Description of Artificial Sequence: Synthetic polypeptide

SEQ ID NO: 182 - protein, 214 aa, Artificial Sequence; identical to SEQ ID NO: 141
  Description of Artificial Sequence: Synthetic polypeptide

SEQ ID NO: 183 - protein, 701 aa, Artificial Sequence; identical to SEQ ID NO: 178
  Description of Artificial Sequence: Synthetic polypeptide

SEQ ID NO: 184 - protein, 457 aa, Artificial Sequence; identical to SEQ ID NO: 149
  Description of Artificial Sequence: Synthetic polypeptide

SEQ ID NO: 185 - protein, 214 aa, Artificial Sequence; identical to SEQ ID NO: 141
  Description of Artificial Sequence: Synthetic polypeptide

SEQ ID NO: 186 - protein, 457 aa, Artificial Sequence; identical to SEQ ID NO: 149
  Description of Artificial Sequence: Synthetic polypeptide

SEQ ID NO: 187 - protein, 443 aa, Artificial Sequence; identical to SEQ ID NO: 79
  Description of Artificial Sequence: Synthetic polypeptide

SEQ ID NO: 188 - protein, 214 aa, Artificial Sequence; identical to SEQ ID NO: 141
  Description of Artificial Sequence: Synthetic polypeptide

SEQ ID NO: 189 - protein, 214 aa, Artificial Sequence; identical to SEQ ID NO: 64
  Description of Artificial Sequence: Synthetic polypeptide

SEQ ID NO: 190 - protein, 457 aa, Artificial Sequence; identical to SEQ ID NO: 149
  Description of Artificial Sequence: Synthetic polypeptide

SEQ ID NO: 191 - protein, 443 aa, Artificial Sequence; identical to SEQ ID NO: 79
  Description of Artificial Sequence: Synthetic polypeptide

SEQ ID NO: 192 - protein, 214 aa, Artificial Sequence; identical to SEQ ID NO: 141
  Description of Artificial Sequence: Synthetic polypeptide

SEQ ID NO: 193 - protein, 214 aa, Artificial Sequence; identical to SEQ ID NO: 64
  Description of Artificial Sequence: Synthetic polypeptide

SEQ ID NO: 194 - protein, 700 aa, Artificial Sequence
  Description of Artificial Sequence: Synthetic polypeptide
QVQLQQSGPELVKPGASVKMSCKASGYTFTSYHIQWVKQRPGQGLEWIGWIYPGDGSTQYNEKFKGKTTLTADKSSSTAYMLLSSLTSEDSAIYFCAREGTYYAMDYWGQGTSVTVSSASTKGPSVFPLAPCSRSTSESTAALGCLVKDYFPEPVTVSWNSGALTSGVHTFPAVLQSSGLYSLSSVVTVPSSSLGTKTYTCNVDHKPSNTKVDKRVESKYGPPCPSCPAPEFLGGPSVFLFPPKPKDTLMISRTPEVTCVVVDVSQEDPEVQFNWYVDGVEVHNAKTKPREEQFNSTYRVVSVLTVLHQDWLNGKEYKCKVSNKGLPSSIEKTISKAKGQPREPQVYTLPPSQEEMTKNQVSLTCLVKGFYPSDIAVEWESNGQPENNYKTTPPVLDSDGSFFLYSRLTVDKSRWQEGNVFSCSVMHEALHNHYTQKSLSLSLGKGGGGAGGGGQVQLVQSGVEVKKPGASVKVSCKASGYTFTNYYMYWVRQAPGQGLEWMGGINPSNGGTNFNEKFKNRVTLTTDSSTTTAYMELKSLQFDDTAVYYCARRDYRFDMGFDYWGQGTTVTVSSGGGGSGGGGSGGGGSEIVLTQSPATLSLSPGERATLSCRASKGVSTSGYSYLHWYQQKPGQAPRLLIYLASYLESGVPARFSGSGSGTDFTLTISSLEPEDFAVYYCQHSRDLPLTFGGGTKVEIK

SEQ ID NO: 195 - protein, 219 aa, Artificial Sequence
  Description of Artificial Sequence: Synthetic polypeptide
DVLMTQTPLSLPVSLGDQVSISCRSSQSIVHSNGNTYLEWYLQKPGQSPKLLIYKVSNRFSGVPDRFSGSGSGTDFTLKISRVEAEDLGVYYCFQGSHVPRTFGGGTKLEIKRTVAAPSVFIFPPSDEQLKSGTASVVCLLNNFYPREAKVQWKVDNALQSGNSQESVTEQDSKDSTYSLSSTLTLSKADYEKHKVYACEVTHQGLSSPVTKSFNRGEC

SEQ ID NO: 196 - protein, 700 aa, Artificial Sequence
  Description of Artificial Sequence: Synthetic polypeptide
QVQLQQSGPELVKPGASVKMSCKASGYTFTSYHIQWVKQRPGQGLEWIGWIYPGDGSTQYNEKFKGKTTLTADKSSSTAYMLLSSLTSEDSAIYFCAREGTYYAMDYWGQGTSVTVSSASTKGPSVFPLAPCSRSTSESTAALGCLVKDYFPEPVTVSWNSGALTSGVHTFPAVLQSSGLYSLSSVVTVPSSSLGTKTYTCNVDHKPSNTKVDKRVESKYGPPCPSCPAPEFLGGPSVFLFPPKPKDTLMISRTPEVTCVVVDVSQEDPEVQFNWYVDGVEVHNAKTKPREEQFNSTYRVVSVLTVLHQDWLNGKEYKCKVSNKGLPSSIEKTISKAKGQPREPQVYTLPPSQEEMTKNQVSLTCLVKGFYPSDIAVEWESNGQPENNYKTTPPVLDSDGSFFLYSRLTVDKSRWQEGNVFSCSVMHEALHNHYTQKSLSLSLGKGGGGAGGGGEIVLTQSPATLSLSPGERATLSCRASKGVSTSGYSYLHWYQQKPGQAPRLLIYLASYLESGVPARFSGSGSGTDFTLTISSLEPEDFAVYYCQHSRDLPLTFGGGTKVEIKGGGGSGGGGSGGGGSQVQLVQSGVEVKKPGASVKVSCKASGYTFTNYYMYWVRQAPGQGLEWMGGINPSNGGTNFNEKFKNRVTLTTDSSTTTAYMELKSLQFDDTAVYYCARRDYRFDMGFDYWGQGTTVTVSS

SEQ ID NO: 197 - protein, 219 aa, Artificial Sequence; identical to SEQ ID NO: 195
  Description of Artificial Sequence: Synthetic polypeptide

SEQ ID NO: 198 - protein, 701 aa, Artificial Sequence
  Description of Artificial Sequence: Synthetic polypeptide
QVQLVQSGVEVKKPGASVKVSCKASGYTFTNYYMYWVRQAPGQGLEWMGGINPSNGGTNFNEKFKNRVTLTTDSSTTTAYMELKSLQFDDTAVYYCARRDYRFDMGFDYWGQGTTVTVSSASTKGPSVFPLAPCSRSTSESTAALGCLVKDYFPEPVTVSWNSGALTSGVHTFPAVLQSSGLYSLSSVVTVPSSSLGTKTYTCNVDHKPSNTKVDKRVESKYGPPCPSCPAPEFLGGPSVFLFPPKPKDTLMISRTPEVTCVVVDVSQEDPEVQFNWYVDGVEVHNAKTKPREEQFNSTYRVVSVLTVLHQDWLNGKEYKCKVSNKGLPSSIEKTISKAKGQPREPQVYTLPPSQEEMTKNQVSLTCLVKGFYPSDIAVEWESNGQPENNYKTTPPVLDSDGSFFLYSRLTVDKSRWQEGNVFSCSVMHEALHNHYTQKSLSLSLGKGGGGAGGGGQVQLQQSGPELVKPGASVKMSCKASGYTFTSYHIQWVKQRPGQGLEWIGWIYPGDGSTQYNEKFKGKTTLTADKSSSTAYMLLSSLTSEDSAIYFCAREGTYYAMDYWGQGTSVTVSSGGGGSGGGGSGGGGSDVLMTQTPLSLPVSLGDQVSISCRSSQSIVHSNGNTYLEWYLQKPGQSPKLLIYKVSNRFSGVPDRFSGSGSGTDFTLKISRVEAEDLGVYYCFQGSHVPRTFGGGTKLEIK

SEQ ID NO: 199 - protein, 218 aa, Artificial Sequence; identical to SEQ ID NO: 37
  Description of Artificial Sequence: Synthetic polypeptide

SEQ ID NO: 200 - protein, 701 aa, Artificial Sequence
  Description of Artificial Sequence: Synthetic polypeptide
QVQLVQSGVEVKKPGASVKVSCKASGYTFTNYYMYWVRQAPGQGLEWMGGINPSNGGTNFNEKFKNRVTLTTDSSTTTAYMELKSLQFDDTAVYYCARRDYRFDMGFDYWGQGTTVTVSSASTKGPSVFPLAPCSRSTSESTAALGCLVKDYFPEPVTVSWNSGALTSGVHTFPAVLQSSGLYSLSSVVTVPSSSLGTKTYTCNVDHKPSNTKVDKRVESKYGPPCPSCPAPEFLGGPSVFLFPPKPKDTLMISRTPEVTCVVVDVSQEDPEVQFNWYVDGVEVHNAKTKPREEQFNSTYRVVSVLTVLHQDWLNGKEYKCKVSNKGLPSSIEKTISKAKGQPREPQVYTLPPSQEEMTKNQVSLTCLVKGFYPSDIAVEWESNGQPENNYKTTPPVLDSDGSFFLYSRLTVDKSRWQEGNVFSCSVMHEALHNHYTQKSLSLSLGKGGGGAGGGGDVLMTQTPLSLPVSLGDQVSISCRSSQSIVHSNGNTYLEWYLQKPGQSPKLLIYKVSNRFSGVPDRFSGSGSGTDFTLKISRVEAEDLGVYYCFQGSHVPRTFGGGTKLEIKGGGGSGGGGSGGGGSQVQLQQSGPELVKPGASVKMSCKASGYTFTSYHIQWVKQRPGQGLEWIGWIYPGDGSTQYNEKFKGKTTLTADKSSSTAYMLLSSLTSEDSAIYFCAREGTYYAMDYWGQGTSVTVSS

SEQ ID NO: 201 - protein, 218 aa, Artificial Sequence; identical to SEQ ID NO: 37
  Description of Artificial Sequence: Synthetic polypeptide

SEQ ID NO: 202 - protein, 703 aa, Artificial Sequence
  Description of Artificial Sequence: Synthetic polypeptide
QVQLQQSGPELVKPGASVKMSCKASGYTFTSYHIQWVKQRPGQGLEWIGWIYPGDGSTQYNEKFKGKTTLTADKSSSTAYMLLSSLTSEDSAIYFCAREGTYYAMDYWGQGTSVTVSSASTKGPSVFPLAPSSKSTSGGTAALGCLVKDYFPEPVTVSWNSGALTSGVHTFPAVLQSSGLYSLSSVVTVPSSSLGTQTYICNVNHKPSNTKVDKKVEPKSCDKTHTCPPCPAPEAAGGPSVFLFPPKPKDTLMISRTPEVTCVVVDVSHEDPEVKFNWYVDGVEVHNAKTKPREEQYNSTYRVVSVLTVLHQDWLNGKEYKCKVSNKALPAPIEKTISKAKGQPREPQVYTLPPSRDELTKNQVSLWCLVKGFYPSDIAVEWESNGQPENNYKTTPPVLDSDGSFFLYSKLTVDKSRWQQGNVFSCSVMHEALHNHYTQKSLSLSPGKGGGGAGGGGQVQLVQSGVEVKKPGASVKVSCKASGYTFTNYYMYWVRQAPGQGLEWMGGINPSNGGTNFNEKFKNRVTLTTDSSTTTAYMELKSLQFDDTAVYYCARRDYRFDMGFDYWGQGTTVTVSSGGGGSGGGGSGGGGSEIVLTQSPATLSLSPGERATLSCRASKGVSTSGYSYLHWYQQKPGQAPRLLIYLASYLESGVPARFSGSGSGTDFTLTISSLEPEDFAVYYCQHSRDLPLTFGGGTKVEIK

SEQ ID NO: 203 - protein, 448 aa, Artificial Sequence
  Description of Artificial Sequence: Synthetic polypeptide
QVQLQQSGPELVKPGASVKMSCKASGYTFTSYHIQWVKQRPGQGLEWIGWIYPGDGSTQYNEKFKGKTTLTADKSSSTAYMLLSSLTSEDSAIYFCAREGTYYAMDYWGQGTSVTVSSASTKGPSVFPLAPSSKSTSGGTAALGCLVKDYFPEPVTVSWNSGALTSGVHTFPAVLQSSGLYSLSSVVTVPSSSLGTQTYICNVNHKPSNTKVDKKVEPKSCDKTHTCPPCPAPEAAGGPSVFLFPPKPKDTLMISRTPEVTCVVVDVSHEDPEVKFNWYVDGVEVHNAKTKPREEQYNSTYRVVSVLTVLHQDWLNGKEYKCKVSNKALPAPIEKTISKAKGQPREPQVYTLPPSRDELTKNQVSLWCLVKGFYPSDIAVEWESNGQPENNYKTTPPVLDSDGSFFLYSKLTVDKSRWQQGNVFSCSVMHEALHNHYTQKSLSLSPGK

SEQ ID NO: 204 - protein, 219 aa, Artificial Sequence; identical to SEQ ID NO: 195
  Description of Artificial Sequence: Synthetic polypeptide

SEQ ID NO: 205 - protein, 703 aa, Artificial Sequence
  Description of Artificial Sequence: Synthetic polypeptide
QVQLQQSGPELVKPGASVKMSCKASGYTFTSYHIQWVKQRPGQGLEWIGWIYPGDGSTQYNEKFKGKTTLTADKSSSTAYMLLSSLTSEDSAIYFCAREGTYYAMDYWGQGTSVTVSSASTKGPSVFPLAPSSKSTSGGTAALGCLVKDYFPEPVTVSWNSGALTSGVHTFPAVLQSSGLYSLSSVVTVPSSSLGTQTYICNVNHKPSNTKVDKKVEPKSCDKTHTCPPCPAPEAAGGPSVFLFPPKPKDTLMISRTPEVTCVVVDVSHEDPEVKFNWYVDGVEVHNAKTKPREEQYNSTYRVVSVLTVLHQDWLNGKEYKCKVSNKALPAPIEKTISKAKGQPREPQVYTLPPSRDELTKNQVSLWCLVKGFYPSDIAVEWESNGQPENNYKTTPPVLDSDGSFFLYSKLTVDKSRWQQGNVFSCSVMHEALHNHYTQKSLSLSPGKGGGGAGGGGEIVLTQSPATLSLSPGERATLSCRASKGVSTSGYSYLHWYQQKPGQAPRLLIYLASYLESGVPARFSGSGSGTDFTLTISSLEPEDFAVYYCQHSRDLPLTFGGGTKVEIKGGGGSGGGGSGGGGSQVQLVQSGVEVKKPGASVKVSCKASGYTFTNYYMYWVRQAPGQGLEWMGGINPSNGGTNFNEKFKNRVTLTTDSSTTTAYMELKSLQFDDTAVYYCARRDYRFDMGFDYWGQGTTVTVSS

SEQ ID NO: 206 - protein, 219 aa, Artificial Sequence; identical to SEQ ID NO: 195
  Description of Artificial Sequence: Synthetic polypeptide

SEQ ID NO: 207 - protein, 703 aa, Artificial Sequence; identical to SEQ ID NO: 202
  Description of Artificial Sequence: Synthetic polypeptide

SEQ ID NO: 208 - protein, 448 aa, Artificial Sequence; identical to SEQ ID NO: 203
  Description of Artificial Sequence: Synthetic polypeptide

SEQ ID NO: 209 - protein, 219 aa, Artificial Sequence; identical to SEQ ID NO: 195
  Description of Artificial Sequence: Synthetic polypeptide

SEQ ID NO: 210 - protein, 703 aa, Artificial Sequence; identical to SEQ ID NO: 205
  Description of Artificial Sequence: Synthetic polypeptide

SEQ ID NO: 211 - protein, 448 aa, Artificial Sequence; identical to SEQ ID NO: 203
  Description of Artificial Sequence: Synthetic polypeptide

SEQ ID NO: 212 - protein, 219 aa, Artificial Sequence; identical to SEQ ID NO: 195
  Description of Artificial Sequence: Synthetic polypeptide

SEQ ID NO: 213 - protein, 448 aa, Artificial Sequence; identical to SEQ ID NO: 203
  Description of Artificial Sequence: Synthetic polypeptide

SEQ ID NO: 214 - protein, 450 aa, Artificial Sequence; identical to SEQ ID NO: 52
  Description of Artificial Sequence: Synthetic polypeptide

SEQ ID NO: 215 - protein, 219 aa, Artificial Sequence; identical to SEQ ID NO: 195
  Description of Artificial Sequence: Synthetic polypeptide

SEQ ID NO: 216 - protein, 218 aa, Artificial Sequence; identical to SEQ ID NO: 37
  Description of Artificial Sequence: Synthetic polypeptide

SEQ ID NO: 217 - protein, 448 aa, Artificial Sequence; identical to SEQ ID NO: 203
  Description of Artificial Sequence: Synthetic polypeptide

SEQ ID NO: 218 - protein, 450 aa, Artificial Sequence; identical to SEQ ID NO: 52
  Description of Artificial Sequence: Synthetic polypeptide

SEQ ID NO: 219 - protein, 219 aa, Artificial Sequence; identical to SEQ ID NO: 195
  Description of Artificial Sequence: Synthetic polypeptide

SEQ ID NO: 220 - protein, 218 aa, Artificial Sequence; identical to SEQ ID NO: 37
  Description of Artificial Sequence: Synthetic polypeptide

SEQ ID NO: 221 - protein, 689 aa, Artificial Sequence
  Description of Artificial Sequence: Synthetic polypeptide
QVQLQQSGPELVKPGASVKMSCKASGYTFTSYHIQWVKQRPGQGLEWIGWIYPGDGSTQYNEKFKGKTTLTADKSSSTAYMLLSSLTSEDSAIYFCAREGTYYAMDYWGQGTSVTVSSASTKGPSVFPLAPCSRSTSESTAALGCLVKDYFPEPVTVSWNSGALTSGVHTFPAVLQSSGLYSLSSVVTVPSSSLGTKTYTCNVDHKPSNTKVDKRVESKYGPPCPSCPAPEFLGGPSVFLFPPKPKDTLMISRTPEVTCVVVDVSQEDPEVQFNWYVDGVEVHNAKTKPREEQFNSTYRVVSVLTVLHQDWLNGKEYKCKVSNKGLPSSIEKTISKAKGQPREPQVYTLPPSQEEMTKNQVSLTCLVKGFYPSDIAVEWESNGQPENNYKTTPPVLDSDGSFFLYSRLTVDKSRWQEGNVFSCSVMHEALHNHYTQKSLSLSLGKGGGGAGGGGQVQLVESGGGVVQPGRSLRLDCKASGITFSNSGMHWVRQAPGKGLEWVAVIWYDGSKRYYADSVKGRFTISRDNSKNTLFLQMNSLRAEDTAVYYCATNDDYWGQGTLVTVSSGGGGSGGGGSGGGGSEIVLTQSPATLSLSPGERATLSCRASQSVSSYLAWYQQKPGQAPRLLIYDASNRATGIPARFSGSGSGTDFTLTISSLEPEDFAVYYCQQSSNWPRTFGQGTKVEIK

SEQ ID NO: 222 - protein, 219 aa, Artificial Sequence; identical to SEQ ID NO: 195
  Description of Artificial Sequence: Synthetic polypeptide

SEQ ID NO: 223 - protein, 689 aa, Artificial Sequence
  Description of Artificial Sequence: Synthetic polypeptide
QVQLQQSGPELVKPGASVKMSCKASGYTFTSYHIQWVKQRPGQGLEWIGWIYPGDGSTQYNEKFKGKTTLTADKSSSTAYMLLSSLTSEDSAIYFCAREGTYYAMDYWGQGTSVTVSSASTKGPSVFPLAPCSRSTSESTAALGCLVKDYFPEPVTVSWNSGALTSGVHTFPAVLQSSGLYSLSSVVTVPSSSLGTKTYTCNVDHKPSNTKVDKRVESKYGPPCPSCPAPEFLGGPSVFLFPPKPKDTLMISRTPEVTCVVVDVSQEDPEVQFNWYVDGVEVHNAKTKPREEQFNSTYRVVSVLTVLHQDWLNGKEYKCKVSNKGLPSSIEKTISKAKGQPREPQVYTLPPSQEEMTKNQVSLTCLVKGFYPSDIAVEWESNGQPENNYKTTPPVLDSDGSFFLYSRLTVDKSRWQEGNVFSCSVMHEALHNHYTQKSLSLSLGKGGGGAGGGGEIVLTQSPATLSLSPGERATLSCRASQSVSSYLAWYQQKPGQAPRLLIYDASNRATGIPARFSGSGSGTDFTLTISSLEPEDFAVYYCQQSSNWPRTFGQGTKVEIKGGGGSGGGGSGGGGSQVQLVESGGGVVQPGRSLRLDCKASGITFSNSGMHWVRQAPGKGLEWVAVIWYDGSKRYYADSVKGRFTISRDNSKNTLFLQMNSLRAEDTAVYYCATNDDYWGQGTLVTVSS

SEQ ID NO: 224 - protein, 219 aa, Artificial Sequence; identical to SEQ ID NO: 195
  Description of Artificial Sequence: Synthetic polypeptide

SEQ ID NO: 225 - protein, 694 aa, Artificial Sequence
  Description of Artificial Sequence: Synthetic polypeptide
QVQLVESGGGVVQPGRSLRLDCKASGITFSNSGMHWVRQAPGKGLEWVAVIWYDGSKRYYADSVKGRFTISRDNSKNTLFLQMNSLRAEDTAVYYCATNDDYWGQGTLVTVSSASTKGPSVFPLAPCSRSTSESTAALGCLVKDYFPEPVTVSWNSGALTSGVHTFPAVLQSSGLYSLSSVVTVPSSSLGTKTYTCNVDHKPSNTKVDKRVESKYGPPCPSCPAPEFLGGPSVFLFPPKPKDTLMISRTPEVTCVVVDVSQEDPEVQFNWYVDGVEVHNAKTKPREEQFNSTYRVVSVLTVLHQDWLNGKEYKCKVSNKGLPSSIEKTISKAKGQPREPQVYTLPPSQEEMTKNQVSLTCLVKGFYPSDIAVEWESNGQPENNYKTTPPVLDSDGSFFLYSRLTVDKSRWQEGNVFSCSVMHEALHNHYTQKSLSLSLGKGGGGAGGGGQVQLQQSGPELVKPGASVKMSCKASGYTFTSYHIQWVKQRPGQGLEWIGWIYPGDGSTQYNEKFKGKTTLTADKSSSTAYMLLSSLTSEDSAIYFCAREGTYYAMDYWGQGTSVTVSSGGGGSGGGGSGGGGSDVLMTQTPLSLPVSLGDQVSISCRSSQSIVHSNGNTYLEWYLQKPGQSPKLLIYKVSNRFSGVPDRFSGSGSGTDFTLKISRVEAEDLGVYYCFQGSHVPRTFGGGTKLEIK

SEQ ID NO: 226 - protein, 214 aa, Artificial Sequence; identical to SEQ ID NO: 64
  Description of Artificial Sequence: Synthetic polypeptide

SEQ ID NO: 227 - protein, 694 aa, Artificial Sequence
  Description of Artificial Sequence: Synthetic polypeptide
QVQLVESGGGVVQPGRSLRLDCKASGITFSNSGMHWVRQAPGKGLEWVAVIWYDGSKRYYADSVKGRFTISRDNSKNTLFLQMNSLRAEDTAVYYCATNDDYWGQGTLVTVSSASTKGPSVFPLAPCSRSTSESTAALGCLVKDYFPEPVTVSWNSGALTSGVHTFPAVLQSSGLYSLSSVVTVPSSSLGTKTYTCNVDHKPSNTKVDKRVESKYGPPCPSCPAPEFLGGPSVFLFPPKPKDTLMISRTPEVTCVVVDVSQEDPEVQFNWYVDGVEVHNAKTKPREEQFNSTYRVVSVLTVLHQDWLNGKEYKCKVSNKGLPSSIEKTISKAKGQPREPQVYTLPPSQEEMTKNQVSLTCLVKGFYPSDIAVEWESNGQPENNYKTTPPVLDSDGSFFLYSRLTVDKSRWQEGNVFSCSVMHEALHNHYTQKSLSLSLGKGGGGAGGGGDVLMTQTPLSLPVSLGDQVSISCRSSQSIVHSNGNTYLEWYLQKPGQSPKLLIYKVSNRFSGVPDRFSGSGSGTDFTLKISRVEAEDLGVYYCFQGSHVPRTFGGGTKLEIKGGGGSGGGGSGGGGSQVQLQQSGPELVKPGASVKMSCKASGYTFTSYHIQWVKQRPGQGLEWIGWIYPGDGSTQYNEKFKGKTTLTADKSSSTAYMLLSSLTSEDSAIYFCAREGTYYAMDYWGQGTSVTVSS

SEQ ID NO: 228 - protein, 214 aa, Artificial Sequence; identical to SEQ ID NO: 64
  Description of Artificial Sequence: Synthetic polypeptide

SEQ ID NO: 229 - protein, 692 aa, Artificial Sequence
  Description of Artificial Sequence: Synthetic polypeptide
QVQLQQSGPELVKPGASVKMSCKASGYTFTSYHIQWVKQRPGQGLEWIGWIYPGDGSTQYNEKFKGKTTLTADKSSSTAYMLLSSLTSEDSAIYFCAREGTYYAMDYWGQGTSVTVSSASTKGPSVFPLAPSSKSTSGGTAALGCLVKDYFPEPVTVSWNSGALTSGVHTFPAVLQSSGLYSLSSVVTVPSSSLGTQTYICNVNHKPSNTKVDKKVEPKSCDKTHTCPPCPAPEAAGGPSVFLFPPKPKDTLMISRTPEVTCVVVDVSHEDPEVKFNWYVDGVEVHNAKTKPREEQYNSTYRVVSVLTVLHQDWLNGKEYKCKVSNKALPAPIEKTISKAKGQPREPQVYTLPPSRDELTKNQVSLWCLVKGFYPSDIAVEWESNGQPENNYKTTPPVLDSDGSFFLYSKLTVDKSRWQQGNVFSCSVMHEALHNHYTQKSLSLSPGKGGGGAGGGGQVQLVESGGGVVQPGRSLRLDCKASGITFSNSGMHWVRQAPGKGLEWVAVIWYDGSKRYYADSVKGRFTISRDNSKNTLFLQMNSLRAEDTAVYYCATNDDYWGQGTLVTVSSGGGGSGGGGSGGGGSEIVLTQSPATLSLSPGERATLSCRASQSVSSYLAWYQQKPGQAPRLLIYDASNRATGIPARFSGSGSGTDFTLTISSLEPEDFAVYYCQQSSNWPRTFGQGTKVEIK

SEQ ID NO: 230 - protein, 448 aa, Artificial Sequence; identical to SEQ ID NO: 203
  Description of Artificial Sequence: Synthetic polypeptide

SEQ ID NO: 231 - protein, 219 aa, Artificial Sequence; identical to SEQ ID NO: 195
  Description of Artificial Sequence: Synthetic polypeptide

SEQ ID NO: 232 - protein, 692 aa, Artificial Sequence
  Description of Artificial Sequence: Synthetic polypeptide
QVQLQQSGPELVKPGASVKMSCKASGYTFTSYHIQWVKQRPGQGLEWIGWIYPGDGSTQYNEKFKGKTTLTADKSSSTAYMLLSSLTSEDSAIYFCAREGTYYAMDYWGQGTSVTVSSASTKGPSVFPLAPSSKSTSGGTAALGCLVKDYFPEPVTVSWNSGALTSGVHTFPAVLQSSGLYSLSSVVTVPSSSLGTQTYICNVNHKPSNTKVDKKVEPKSCDKTHTCPPCPAPEAAGGPSVFLFPPKPKDTLMISRTPEVTCVVVDVSHEDPEVKFNWYVDGVEVHNAKTKPREEQYNSTYRVVSVLTVLHQDWLNGKEYKCKVSNKALPAPIEKTISKAKGQPREPQVYTLPPSRDELTKNQVSLWCLVKGFYPSDIAVEWESNGQPENNYKTTPPVLDSDGSFFLYSKLTVDKSRWQQGNVFSCSVMHEALHNHYTQKSLSLSPGKGGGGAGGGGEIVLTQSPATLSLSPGERATLSCRASQSVSSYLAWYQQKPGQAPRLLIYDASNRATGIPARFSGSGSGTDFTLTISSLEPEDFAVYYCQQSSNWPRTFGQGTKVEIKGGGGSGGGGSGGGGSQVQLVESGGGVVQPGRSLRLDCKASGITFSNSGMHWVRQAPGKGLEWVAVIWYDGSKRYYADSVKGRFTISRDNSKNTLFLQMNSLRAEDTAVYYCATNDDYWGQGTLVTVSS

SEQ ID NO: 233 - protein, 219 aa, Artificial Sequence; identical to SEQ ID NO: 195
  Description of Artificial Sequence: Synthetic polypeptide

SEQ ID NO: 234 - protein, 692 aa, Artificial Sequence; identical to SEQ ID NO: 229
  Description of Artificial Sequence: Synthetic polypeptide

SEQ ID NO: 235 - protein, 448 aa, Artificial Sequence; identical to SEQ ID NO: 203
  Description of Artificial Sequence: Synthetic polypeptide

SEQ ID NO: 236 - protein, 219 aa, Artificial Sequence; identical to SEQ ID NO: 195
  Description of Artificial Sequence: Synthetic polypeptide

SEQ ID NO: 237 - protein, 692 aa, Artificial Sequence; identical to SEQ ID NO: 232
  Description of Artificial Sequence: Synthetic polypeptide

SEQ ID NO: 238 - protein, 448 aa, Artificial Sequence; identical to SEQ ID NO: 203
  Description of Artificial Sequence: Synthetic polypeptide

SEQ ID NO: 239 - protein, 219 aa, Artificial Sequence; identical to SEQ ID NO: 195
  Description of Artificial Sequence: Synthetic polypeptide

SEQ ID NO: 240 - protein, 448 aa, Artificial Sequence; identical to SEQ ID NO: 203
  Description of Artificial Sequence: Synthetic polypeptide

SEQ ID NO: 241 - protein, 443 aa, Artificial Sequence; identical to SEQ ID NO: 79
  Description of Artificial Sequence: Synthetic polypeptide

SEQ ID NO: 242 - protein, 219 aa, Artificial Sequence; identical to SEQ ID NO: 195
  Description of Artificial Sequence: Synthetic polypeptide

SEQ ID NO: 243 - protein, 214 aa, Artificial Sequence; identical to SEQ ID NO: 64
  Description of Artificial Sequence: Synthetic polypeptide

SEQ ID NO: 244 - protein, 448 aa, Artificial Sequence; identical to SEQ ID NO: 203
  Description of Artificial Sequence: Synthetic polypeptide

SEQ ID NO: 245 - protein, 443 aa, Artificial Sequence; identical to SEQ ID NO: 79
  Description of Artificial Sequence: Synthetic polypeptide

SEQ ID NO: 246 - protein, 219 aa, Artificial Sequence; identical to SEQ ID NO: 195
  Description of Artificial Sequence: Synthetic polypeptide

SEQ ID NO: 247 - protein, 214 aa, Artificial Sequence; identical to SEQ ID NO: 64
  Description of Artificial Sequence: Synthetic polypeptide

SEQ ID NO: 248 - protein, 701 aa, Artificial Sequence
  Description of Artificial Sequence: Synthetic polypeptide
EVQLQESGPSLVRPSQTLSLTCSVTGDSITSSYWNWIRKFPGNKLEYMGYITYSGNTYYTPSLKSRISITRDTSKNQYFLQLNSVTTEDTATYYCSRDYGRGDYAMVYWGQGTSVTVSSASTKGPSVFPLAPCSRSTSESTAALGCLVKDYFPEPVTVSWNSGALTSGVHTFPAVLQSSGLYSLSSVVTVPSSSLGTKTYTCNVDHKPSNTKVDKRVESKYGPPCPSCPAPEFLGGPSVFLFPPKPKDTLMISRTPEVTCVVVDVSQEDPEVQFNWYVDGVEVHNAKTKPREEQFNSTYRVVSVLTVLHQDWLNGKEYKCKVSNKGLPSSIEKTISKAKGQPREPQVYTLPPSQEEMTKNQVSLTCLVKGFYPSDIAVEWESNGQPENNYKTTPPVLDSDGSFFLYSRLTVDKSRWQEGNVFSCSVMHEALHNHYTQKSLSLSLGKGGGGAGGGGQVQLVQSGVEVKKPGASVKVSCKASGYTFTNYYMYWVRQAPGQGLEWMGGINPSNGGTNFNEKFKNRVTLTTDSSTTTAYMELKSLQFDDTAVYYCARRDYRFDMGFDYWGQGTTVTVSSGGGGSGGGGSGGGGSEIVLTQSPATLSLSPGERATLSCRASKGVSTSGYSYLHWYQQKPGQAPRLLIYLASYLESGVPARFSGSGSGTDFTLTISSLEPEDFAVYYCQHSRDLPLTFGGGTKVEIK

SEQ ID NO: 249 - protein, 214 aa, Artificial Sequence
  Description of Artificial Sequence: Synthetic polypeptide
DVVLTQSPATLSVTPGDSVSLSCRASQSIINNLHWYHQKSHESPRLLIKYASQSISGIPSRFSGSGSGTDFTLSINSVETEDFGVYFCQQSGSWPYTFGGGSNLEIKRTVAAPSVFIFPPSDEQLKSGTASVVCLLNNFYPREAKVQWKVDNALQSGNSQESVTEQDSKDSTYSLSSTLTLSKADYEKHKVYACEVTHQGLSSPVTKSFNRGEC

SEQ ID NO: 250 - protein, 701 aa, Artificial Sequence
  Description of Artificial Sequence: Synthetic polypeptide
EVQLQESGPSLVRPSQTLSLTCSVTGDSITSSYWNWIRKFPGNKLEYMGYITYSGNTYYTPSLKSRISITRDTSKNQYFLQLNSVTTEDTATYYCSRDYGRGDYAMVYWGQGTSVTVSSASTKGPSVFPLAPCSRSTSESTAALGCLVKDYFPEPVTVSWNSGALTSGVHTFPAVLQSSGLYSLSSVVTVPSSSLGTKTYTCNVDHKPSNTKVDKRVESKYGPPCPSCPAPEFLGGPSVFLFPPKPKDTLMISRTPEVTCVVVDVSQEDPEVQFNWYVDGVEVHNAKTKPREEQFNSTYRVVSVLTVLHQDWLNGKEYKCKVSNKGLPSSIEKTISKAKGQPREPQVYTLPPSQEEMTKNQVSLTCLVKGFYPSDIAVEWESNGQPENNYKTTPPVLDSDGSFFLYSRLTVDKSRWQEGNVFSCSVMHEALHNHYTQKSLSLSLGKGGGGAGGGGEIVLTQSPATLSLSPGERATLSCRASKGVSTSGYSYLHWYQQKPGQAPRLLIYLASYLESGVPARFSGSGSGTDFTLTISSLEPEDFAVYYCQHSRDLPLTFGGGTKVEIKGGGGSGGGGSGGGGSQVQLVQSGVEVKKPGASVKVSCKASGYTFTNYYMYWVRQAPGQGLEWMGGINPSNGGTNFNEKFKNRVTLTTDSSTTTAYMELKSLQFDDTAVYYCARRDYRFDMGFDYWGQGTTVTVSS

SEQ ID NO: 251 - protein, 214 aa, Artificial Sequence; identical to SEQ ID NO: 249
  Description of Artificial Sequence: Synthetic polypeptide

SEQ ID NO: 252 - protein, 697 aa, Artificial Sequence
  Description of Artificial Sequence: Synthetic polypeptide
QVQLVQSGVEVKKPGASVKVSCKASGYTFTNYYMYWVRQAPGQGLEWMGGINPSNGGTNFNEKFKNRVTLTTDSSTTTAYMELKSLQFDDTAVYYCARRDYRFDMGFDYWGQGTTVTVSSASTKGPSVFPLAPCSRSTSESTAALGCLVKDYFPEPVTVSWNSGALTSGVHTFPAVLQSSGLYSLSSVVTVPSSSLGTKTYTCNVDHKPSNTKVDKRVESKYGPPCPSCPAPEFLGGPSVFLFPPKPKDTLMISRTPEVTCVVVDVSQEDPEVQFNWYVDGVEVHNAKTKPREEQFNSTYRVVSVLTVLHQDWLNGKEYKCKVSNKGLPSSIEKTISKAKGQPREPQVYTLPPSQEEMTKNQVSLTCLVKGFYPSDIAVEWESNGQPENNYKTTPPVLDSDGSFFLYSRLTVDKSRWQEGNVFSCSVMHEALHNHYTQKSLSLSLGKGGGGAGGGGEVQLQESGPSLVRPSQTLSLTCSVTGDSITSSYWNWIRKFPGNKLEYMGYITYSGNTYYTPSLKSRISITRDTSKNQYFLQLNSVTTEDTATYYCSRDYGRGDYAMVYWGQGTSVTVSSGGGGSGGGGSGGGGSDVVLTQSPATLSVTPGDSVSLSCRASQSIINNLHWYHQKSHESPRLLIKYASQSISGIPSRFSGSGSGTDFTLSINSVETEDFGVYFCQQSGSWPYTFGGGSNLEIK

SEQ ID NO: 253 - protein, 218 aa, Artificial Sequence; identical to SEQ ID NO: 37
  Description of Artificial Sequence: Synthetic polypeptide

SEQ ID NO: 254 - protein, 697 aa, Artificial Sequence
  Description of Artificial Sequence: Synthetic polypeptide
QVQLVQSGVEVKKPGASVKVSCKASGYTFTNYYMYWVRQAPGQGLEWMGGINPSNGGTNFNEKFKNRVTLTTDSSTTTAYMELKSLQFDDTAVYYCARRDYRFDMGFDYWGQGTTVTVSSASTKGPSVFPLAPCSRSTSESTAALGCLVKDYFPEPVTVSWNSGALTSGVHTFPAVLQSSGLYSLSSVVTVPSSSLGTKTYTCNVDHKPSNTKVDKRVESKYGPPCPSCPAPEFLGGPSVFLFPPKPKDTLMISRTPEVTCVVVDVSQEDPEVQFNWYVDGVEVHNAKTKPREEQFNSTYRVVSVLTVLHQDWLNGKEYKCKVSNKGLPSSIEKTISKAKGQPREPQVYTLPPSQEEMTKNQVSLTCLVKGFYPSDIAVEWESNGQPENNYKTTPPVLDSDGSFFLYSRLTVDKSRWQEGNVFSCSVMHEALHNHYTQKSLSLSLGKGGGGAGGGGDVVLTQSPATLSVTPGDSVSLSCRASQSIINNLHWYHQKSHESPRLLIKYASQSISGIPSRFSGSGSGTDFTLSINSVETEDFGVYFCQQSGSWPYTFGGGSNLEIKGGGGSGGGGSGGGGSEVQLQESGPSLVRPSQTLSLTCSVTGDSITSSYWNWIRKFPGNKLEYMGYITYSGNTYYTPSLKSRISITRDTSKNQYFLQLNSVTTEDTATYYCSRDYGRGDYAMVYWGQGTSVTVSS

SEQ ID NO: 255 - protein, 218 aa, Artificial Sequence; identical to SEQ ID NO: 37
  Description of Artificial Sequence: Synthetic polypeptide

SEQ ID NO: 256 - protein, 704 aa, Artificial Sequence
  Description of Artificial Sequence: Synthetic polypeptide
EVQLQESGPSLVRPSQTLSLTCSVTGDSITSSYWNWIRKFPGNKLEYMGYITYSGNTYYTPSLKSRISITRDTSKNQYFLQLNSVTTEDTATYYCSRDYGRGDYAMVYWGQGTSVTVSSASTKGPSVFPLAPSSKSTSGGTAALGCLVKDYFPEPVTVSWNSGALTSGVHTFPAVLQSSGLYSLSSVVTVPSSSLGTQTYICNVNHKPSNTKVDKKVEPKSCDKTHTCPPCPAPEAAGGPSVFLFPPKPKDTLMISRTPEVTCVVVDVSHEDPEVKFNWYVDGVEVHNAKTKPREEQYNSTYRVVSVLTVLHQDWLNGKEYKCKVSNKALPAPIEKTISKAKGQPREPQVYTLPPSRDELTKNQVSLWCLVKGFYPSDIAVEWESNGQPENNYKTTPPVLDSDGSFFLYSKLTVDKSRWQQGNVFSCSVMHEALHNHYTQKSLSLSPGKGGGGAGGGGQVQLVQSGVEVKKPGASVKVSCKASGYTFTNYYMYWVRQAPGQGLEWMGGINPSNGGTNFNEKFKNRVTLTTDSSTTTAYMELKSLQFDDTAVYYCARRDYRFDMGFDYWGQGTTVTVSSGGGGSGGGGSGGGGSEIVLTQSPATLSLSPGERATLSCRASKGVSTSGYSYLHWYQQKPGQAPRLLIYLASYLESGVPARFSGSGSGTDFTLTISSLEPEDFAVYYCQHSRDLPLTFGGGTKVEIK

SEQ ID NO: 257 - protein, 449 aa, Artificial Sequence
  Description of Artificial Sequence: Synthetic polypeptide
EVQLQESGPSLVRPSQTLSLTCSVTGDSITSSYWNWIRKFPGNKLEYMGYITYSGNTYYTPSLKSRISITRDTSKNQYFLQLNSVTTEDTATYYCSRDYGRGDYAMVYWGQGTSVTVSSASTKGPSVFPLAPSSKSTSGGTAALGCLVKDYFPEPVTVSWNSGALTSGVHTFPAVLQSSGLYSLSSVVTVPSSSLGTQTYICNVNHKPSNTKVDKKVEPKSCDKTHTCPPCPAPEAAGGPSVFLFPPKPKDTLMISRTPEVTCVVVDVSHEDPEVKFNWYVDGVEVHNAKTKPREEQYNSTYRVVSVLTVLHQDWLNGKEYKCKVSNKALPAPIEKTISKAKGQPREPQVYTLPPSRDELTKNQVSLWCLVKGFYPSDIAVEWESNGQPENNYKTTPPVLDSDGSFFLYSKLTVDKSRWQQGNVFSCSVMHEALHNHYTQKSLSLSPGK

SEQ ID NO: 258 - protein, 214 aa, Artificial Sequence; identical to SEQ ID NO: 249
  Description of Artificial Sequence: Synthetic polypeptide

SEQ ID NO: 259 - protein, 704 aa, Artificial Sequence
  Description of Artificial Sequence: Synthetic polypeptide
EVQLQESGPSLVRPSQTLSLTCSVTGDSITSSYWNWIRKFPGNKLEYMGYITYSGNTYYTPSLKSRISITRDTSKNQYFLQLNSVTTEDTATYYCSRDYGRGDYAMVYWGQGTSVTVSSASTKGPSVFPLAPSSKSTSGGTAALGCLVKDYFPEPVTVSWNSGALTSGVHTFPAVLQSSGLYSLSSVVTVPSSSLGTQTYICNVNHKPSNTKVDKKVEPKSCDKTHTCPPCPAPEAAGGPSVFLFPPKPKDTLMISRTPEVTCVVVDVSHEDPEVKFNWYVDGVEVHNAKTKPREEQYNSTYRVVSVLTVLHQDWLNGKEYKCKVSNKALPAPIEKTISKAKGQPREPQVYTLPPSRDELTKNQVSLWCLVKGFYPSDIAVEWESNGQPENNYKTTPPVLDSDGSFFLYSKLTVDKSRWQQGNVFSCSVMHEALHNHYTQKSLSLSPGKGGGGAGGGGEIVLTQSPATLSLSPGERATLSCRASKGVSTSGYSYLHWYQQKPGQAPRLLIYLASYLESGVPARFSGSGSGTDFTLTISSLEPEDFAVYYCQHSRDLPLTFGGGTKVEIKGGGGSGGGGSGGGGSQVQLVQSGVEVKKPGASVKVSCKASGYTFTNYYMYWVRQAPGQGLEWMGGINPSNGGTNFNEKFKNRVTLTTDSSTTTAYMELKSLQFDDTAVYYCARRDYRFDMGFDYWGQGTTVTVSS

SEQ ID NO: 260 - protein, 214 aa, Artificial Sequence; identical to SEQ ID NO: 249
  Description of Artificial Sequence: Synthetic polypeptide

SEQ ID NO: 261 - protein, 704 aa, Artificial Sequence; identical to SEQ ID NO: 256
  Description of Artificial Sequence: Synthetic polypeptide

SEQ ID NO: 262 - protein, 449 aa, Artificial Sequence; identical to SEQ ID NO: 257
  Description of Artificial Sequence: Synthetic polypeptide

SEQ ID NO: 263 - protein, 214 aa, Artificial Sequence; identical to SEQ ID NO: 249
  Description of Artificial Sequence: Synthetic polypeptide

SEQ ID NO: 264 - protein, 704 aa, Artificial Sequence; identical to SEQ ID NO: 259
  Description of Artificial Sequence: Synthetic polypeptide

SEQ ID NO: 265 - protein, 449 aa, Artificial Sequence; identical to SEQ ID NO: 257
  Description of Artificial Sequence: Synthetic polypeptide

SEQ ID NO: 266 - protein, 214 aa, Artificial Sequence; identical to SEQ ID NO: 249
  Description of Artificial Sequence: Synthetic polypeptide

SEQ ID NO: 267 - protein, 449 aa, Artificial Sequence; identical to SEQ ID NO: 257
  Description of Artificial Sequence: Synthetic polypeptide

SEQ ID NO: 268 - protein, 450 aa, Artificial Sequence; identical to SEQ ID NO: 52
  Description of Artificial Sequence: Synthetic polypeptide

SEQ ID NO: 269 - protein, 214 aa, Artificial Sequence; identical to SEQ ID NO: 249
  Description of Artificial Sequence: Synthetic polypeptide

SEQ ID NO: 270 - protein, 218 aa, Artificial Sequence; identical to SEQ ID NO: 37
  Description of Artificial Sequence: Synthetic polypeptide

SEQ ID NO: 271 - protein, 449 aa, Artificial Sequence; identical to SEQ ID NO: 257
  Description of Artificial Sequence: Synthetic polypeptide

SEQ ID NO: 272 - protein, 450 aa, Artificial Sequence; identical to SEQ ID NO: 52
  Description of Artificial Sequence: Synthetic polypeptide

SEQ ID NO: 273 - protein, 214 aa, Artificial Sequence; identical to SEQ ID NO: 249
  Description of Artificial Sequence: Synthetic polypeptide

SEQ ID NO: 274 - protein, 218 aa, Artificial Sequence; identical to SEQ ID NO: 37
  Description of Artificial Sequence: Synthetic polypeptide

SEQ ID NO: 275 - protein, 690 aa, Artificial Sequence
  Description of Artificial Sequence: Synthetic polypeptide
EVQLQESGPSLVRPSQTLSLTCSVTGDSITSSYWNWIRKFPGNKLEYMGYITYSGNTYYTPSLKSRISITRDTSKNQYFLQLNSVTTEDTATYYCSRDYGRGDYAMVYWGQGTSVTVSSASTKGPSVFPLAPCSRSTSESTAALGCLVKDYFPEPVTVSWNSGALTSGVHTFPAVLQSSGLYSLSSVVTVPSSSLGTKTYTCNVDHKPSNTKVDKRVESKYGPPCPSCPAPEFLGGPSVFLFPPKPKDTLMISRTPEVTCVVVDVSQEDPEVQFNWYVDGVEVHNAKTKPREEQFNSTYRVVSVLTVLHQDWLNGKEYKCKVSNKGLPSSIEKTISKAKGQPREPQVYTLPPSQEEMTKNQVSLTCLVKGFYPSDIAVEWESNGQPENNYKTTPPVLDSDGSFFLYSRLTVDKSRWQEGNVFSCSVMHEALHNHYTQKSLSLSLGKGGGGAGGGGQVQLVESGGGVVQPGRSLRLDCKASGITFSNSGMHWVRQAPGKGLEWVAVIWYDGSKRYYADSVKGRFTISRDNSKNTLFLQMNSLRAEDTAVYYCATNDDYWGQGTLVTVSSGGGGSGGGGSGGGGSEIVLTQSPATLSLSPGERATLSCRASQSVSSYLAWYQQKPGQAPRLLIYDASNRATGIPARFSGSGSGTDFTLTISSLEPEDFAVYYCQQSSNWPRTFGQGTKVEIK

SEQ ID NO: 276 - protein, 214 aa, Artificial Sequence; identical to SEQ ID NO: 249
  Description of Artificial Sequence: Synthetic polypeptide

SEQ ID NO: 277 - protein, 690 aa, Artificial Sequence
  Description of Artificial Sequence: Synthetic polypeptide
EVQLQESGPSLVRPSQTLSLTCSVTGDSITSSYWNWIRKFPGNKLEYMGYITYSGNTYYTPSLKSRISITRDTSKNQYFLQLNSVTTEDTATYYCSRDYGRGDYAMVYWGQGTSVTVSSASTKGPSVFPLAPCSRSTSESTAALGCLVKDYFPEPVTVSWNSGALTSGVHTFPAVLQSSGLYSLSSVVTVPSSSLGTKTYTCNVDHKPSNTKVDKRVESKYGPPCPSCPAPEFLGGPSVFLFPPKPKDTLMISRTPEVTCVVVDVSQEDPEVQFNWYVDGVEVHNAKTKPREEQFNSTYRVVSVLTVLHQDWLNGKEYKCKVSNKGLPSSIEKTISKAKGQPREPQVYTLPPSQEEMTKNQVSLTCLVKGFYPSDIAVEWESNGQPENNYKTTPPVLDSDGSFFLYSRLTVDKSRWQEGNVFSCSVMHEALHNHYTQKSLSLSLGKGGGGAGGGGEIVLTQSPATLSLSPGERATLSCRASQSVSSYLAWYQQKPGQAPRLLIYDASNRATGIPARFSGSGSGTDFTLTISSLEPEDFAVYYCQQSSNWPRTFGQGTKVEIKGGGGSGGGGSGGGGSQVQLVESGGGVVQPGRSLRLDCKASGITFSNSGMHWVRQAPGKGLEWVAVIWYDGSKRYYADSVKGRFTISRDNSKNTLFLQMNSLRAEDTAVYYCATNDDYWGQGTLVTVSS

SEQ ID NO: 278 - protein, 214 aa, Artificial Sequence; identical to SEQ ID NO: 249
  Description of Artificial Sequence: Synthetic polypeptide

SEQ ID NO: 279 - protein, 690 aa, Artificial Sequence
  Description of Artificial Sequence: Synthetic polypeptide
QVQLVESGGGVVQPGRSLRLDCKASGITFSNSGMHWVRQAPGKGLEWVAVIWYDGSKRYYADSVKGRFTISRDNSKNTLFLQMNSLRAEDTAVYYCATNDDYWGQGTLVTVSSASTKGPSVFPLAPCSRSTSESTAALGCLVKDYFPEPVTVSWNSGALTSGVHTFPAVLQSSGLYSLSSVVTVPSSSLGTKTYTCNVDHKPSNTKVDKRVESKYGPPCPSCPAPEFLGGPSVFLFPPKPKDTLMISRTPEVTCVVVDVSQEDPEVQFNWYVDGVEVHNAKTKPREEQFNSTYRVVSVLTVLHQDWLNGKEYKCKVSNKGLPSSIEKTISKAKGQPREPQVYTLPPSQEEMTKNQVSLTCLVKGFYPSDIAVEWESNGQPENNYKTTPPVLDSDGSFFLYSRLTVDKSRWQEGNVFSCSVMHEALHNHYTQKSLSLSLGKGGGGAGGGGEVQLQESGPSLVRPSQTLSLTCSVTGDSITSSYWNWIRKFPGNKLEYMGYITYSGNTYYTPSLKSRISITRDTSKNQYFLQLNSVTTEDTATYYCSRDYGRGDYAMVYWGQGTSVTVSSGGGGSGGGGSGGGGSDVVLTQSPATLSVTPGDSVSLSCRASQSIINNLHWYHQKSHESPRLLIKYASQSISGIPSRFSGSGSGTDFTLSINSVETEDFGVYFCQQSGSWPYTFGGGSNLEIK

SEQ ID NO: 280 - protein, 214 aa, Artificial Sequence; identical to SEQ ID NO: 64
  Description of Artificial Sequence: Synthetic polypeptide

SEQ ID NO: 281 - protein, 690 aa, Artificial Sequence
  Description of Artificial Sequence: Synthetic polypeptide
QVQLVESGGGVVQPGRSLRLDCKASGITFSNSGMHWVRQAPGKGLEWVAVIWYDGSKRYYADSVKGRFTISRDNSKNTLFLQMNSLRAEDTAVYYCATNDDYWGQGTLVTVSSASTKGPSVFPLAPCSRSTSESTAALGCLVKDYFPEPVTVSWNSGALTSGVHTFPAVLQSSGLYSLSSVVTVPSSSLGTKTYTCNVDHKPSNTKVDKRVESKYGPPCPSCPAPEFLGGPSVFLFPPKPKDTLMISRTPEVTCVVVDVSQEDPEVQFNWYVDGVEVHNAKTKPREEQFNSTYRVVSVLTVLHQDWLNGKEYKCKVSNKGLPSSIEKTISKAKGQPREPQVYTLPPSQEEMTKNQVSLTCLVKGFYPSDIAVEWESNGQPENNYKTTPPVLDSDGSFFLYSRLTVDKSRWQEGNVFSCSVMHEALHNHYTQKSLSLSLGKGGGGAGGGGDVVLTQSPATLSVTPGDSVSLSCRASQSIINNLHWYHQKSHESPRLLIKYASQSISGIPSRFSGSGSGTDFTLSINSVETEDFGVYFCQQSGSWPYTFGGGSNLEIKGGGGSGGGGSGGGGSEVQLQESGPSLVRPSQTLSLTCSVTGDSITSSYWNWIRKFPGNKLEYMGYITYSGNTYYTPSLKSRISITRDTSKNQYFLQLNSVTTEDTATYYCSRDYGRGDYAMVYWGQGTSVTVSS

SEQ ID NO: 282 - protein, 214 aa, Artificial Sequence; identical to SEQ ID NO: 64
  Description of Artificial Sequence: Synthetic polypeptide

SEQ ID NO: 283 - protein, 693 aa, Artificial Sequence
  Description of Artificial Sequence: Synthetic polypeptide
EVQLQESGPSLVRPSQTLSLTCSVTGDSITSSYWNWIRKFPGNKLEYMGYITYSGNTYYTPSLKSRISITRDTSKNQYFLQLNSVTTEDTATYYCSRDYGRGDYAMVYWGQGTSVTVSSASTKGPSVFPLAPSSKSTSGGTAALGCLVKDYFPEPVTVSWNSGALTSGVHTFPAVLQSSGLYSLSSVVTVPSSSLGTQTYICNVNHKPSNTKVDKKVEPKSCDKTHTCPPCPAPEAAGGPSVFLFPPKPKDTLMISRTPEVTCVVVDVSHEDPEVKFNWYVDGVEVHNAKTKPREEQYNSTYRVVSVLTVLHQDWLNGKEYKCKVSNKALPAPIEKTISKAKGQPREPQVYTLPPSRDELTKNQVSLWCLVKGFYPSDIAVEWESNGQPENNYKTTPPVLDSDGSFFLYSKLTVDKSRWQQGNVFSCSVMHEALHNHYTQKSLSLSPGKGGGGAGGGGQVQLVESGGGVVQPGRSLRLDCKASGITFSNSGMHWVRQAPGKGLEWVAVIWYDGSKRYYADSVKGRFTISRDNSKNTLFLQMNSLRAEDTAVYYCATNDDYWGQGTLVTVSSGGGGSGGGGSGGGGSEIVLTQSPATLSLSPGERATLSCRASQSVSSYLAWYQQKPGQAPRLLIYDASNRATGIPARFSGSGSGTDFTLTISSLEPEDFAVYYCQQSSNWPRTFGQGTKVEIK

SEQ ID NO: 284 - protein, 449 aa, Artificial Sequence; identical to SEQ ID NO: 257
  Description of Artificial Sequence: Synthetic polypeptide

SEQ ID NO: 285 - protein, 214 aa, Artificial Sequence; identical to SEQ ID NO: 249
  Description of Artificial Sequence: Synthetic polypeptide

SEQ ID NO: 286 - protein, 693 aa, Artificial Sequence
  Description of Artificial Sequence: Synthetic polypeptide
EVQLQESGPSLVRPSQTLSLTCSVTGDSITSSYWNWIRKFPGNKLEYMGYITYSGNTYYTPSLKSRISITRDTSKNQYFLQLNSVTTEDTATYYCSRDYGRGDYAMVYWGQGTSVTVSSASTKGPSVFPLAPSSKSTSGGTAALGCLVKDYFPEPVTVSWNSGALTSGVHTFPAVLQSSGLYSLSSVVTVPSSSLGTQTYICNVNHKPSNTKVDKKVEPKSCDKTHTCPPCPAPEAAGGPSVFLFPPKPKDTLMISRTPEVTCVVVDVSHEDPEVKFNWYVDGVEVHNAKTKPREEQYNSTYRVVSVLTVLHQDWLNGKEYKCKVSNKALPAPIEKTISKAKGQPREPQVYTLPPSRDELTKNQVSLWCLVKGFYPSDIAVEWESNGQPENNYKTTPPVLDSDGSFFLYSKLTVDKSRWQQGNVFSCSVMHEALHNHYTQKSLSLSPGKGGGGAGGGGEIVLTQSPATLSLSPGERATLSCRASQSVSSYLAWYQQKPGQAPRLLIYDASNRATGIPARFSGSGSGTDFTLTISSLEPEDFAVYYCQQSSNWPRTFGQGTKVEIKGGGGSGGGGSGGGGSQVQLVESGGGVVQPGRSLRLDCKASGITFSNSGMHWVRQAPGKGLEWVAVIWYDGSKRYYADSVKGRFTISRDNSKNTLFLQMNSLRAEDTAVYYCATNDDYWGQGTLVTVSS

SEQ ID NO: 287 - protein, 214 aa, Artificial Sequence; identical to SEQ ID NO: 249
  Description of Artificial Sequence: Synthetic polypeptide

SEQ ID NO: 288 - protein, 693 aa, Artificial Sequence; identical to SEQ ID NO: 283
  Description of Artificial Sequence: Synthetic polypeptide

SEQ ID NO: 289 - protein, 449 aa, Artificial Sequence; identical to SEQ ID NO: 257
  Description of Artificial Sequence: Synthetic polypeptide

SEQ ID NO: 290 - protein, 214 aa, Artificial Sequence; identical to SEQ ID NO: 249
  Description of Artificial Sequence: Synthetic polypeptide

SEQ ID NO: 291 - protein, 693 aa, Artificial Sequence; identical to SEQ ID NO: 286
  Description of Artificial Sequence: Synthetic polypeptide

SEQ ID NO: 292 - protein, 449 aa, Artificial Sequence; identical to SEQ ID NO: 257
  Description of Artificial Sequence: Synthetic polypeptide

SEQ ID NO: 293 - protein, 214 aa, Artificial Sequence; identical to SEQ ID NO: 249
  Description of Artificial Sequence: Synthetic polypeptide

SEQ ID NO: 294 - protein, 449 aa, Artificial Sequence; identical to SEQ ID NO: 257
  Description of Artificial Sequence: Synthetic polypeptide

SEQ ID NO: 295 - protein, 443 aa, Artificial Sequence; identical to SEQ ID NO: 79
  Description of Artificial Sequence: Synthetic polypeptide

SEQ ID NO: 296 - protein, 214 aa, Artificial Sequence; identical to SEQ ID NO: 249
  Description of Artificial Sequence: Synthetic polypeptide

SEQ ID NO: 297 - protein, 214 aa, Artificial Sequence; identical to SEQ ID NO: 64
  Description of Artificial Sequence: Synthetic polypeptide

SEQ ID NO: 298 - protein, 449 aa, Artificial Sequence; identical to SEQ ID NO: 257
  Description of Artificial Sequence: Synthetic polypeptide

SEQ ID NO: 299 - protein, 443 aa, Artificial Sequence; identical to SEQ ID NO: 79
  Description of Artificial Sequence: Synthetic polypeptide

SEQ ID NO: 300 - protein, 214 aa, Artificial Sequence; identical to SEQ ID NO: 249
  Description of Artificial Sequence: Synthetic polypeptide

SEQ ID NO: 301 - protein, 214 aa, Artificial Sequence; identical to SEQ ID NO: 64
  Description of Artificial Sequence: Synthetic polypeptide

SEQ ID NO: 302 - DNA, 2166 bp, Artificial Sequence
  Description of Artificial Sequence: Synthetic polynucleotide
atggaatggagctgggtctttctcttcttcctgtcagtaacgactggtgtccactccgacgtgcagctggtggagagcggcggtggcctggtgcagcccggaggtagcaggaagctgagctgcgccgcaagcggcttcacctttagcagcttcggcatgcactgggtgaggcaagcccccgagaagggcctggagtgggtggcatacatcagcagcggcagcaacaccatctactacgccgacaccgtgaagggcaggttcaccattagcagggacaaccccaaaaacaccctgttcctgcagatgaccagcctgaggagcgaggacaccgccatgtactactgcgccctgaccaccggctcttggtttgcctactggggccagggcaccctggtgaccgtgagcgccgctaaaacaacagccccatcggtctatccactggcccctgtgtgtggagatacaactggctcctcggtgactctaggatgcctggtcaagggttatttccctgagccagtgaccttgacctggaactctggttccctgtccagtggtgtgcacaccttcccagctgtcctgcagtctgacctctacaccctcagctcaagcgtgactgtaaccagctcgacctggcccagccagtccatcacctgcaatgtggcccacccggcaagcagcaccaaggtggacaagaaaattgagcccagagggcccacaatcaagccctgtcctccatgcaaatgcccagcacctaacctcgagggtggaccatccgtcttcatcttccctccaaagatcaaggatgtactcatgatctccctgagccccatagtcacatgtgtagtcgttgatgtgagcgaggatgacccagatgtccagatcagctggtttgtgaacaacgtggaagtgcacactgctcagacacagacgcatagagaggattacaacagtactctccgggttgtcagtgccctccccatccagcaccaggactggatgagtggcaaggccttcgcatgcgctgtcaacaacaaagacctcccagcgcccatcgagagaaccatctcaaaacccaaagggtcagtaagagctccacaggtatatgtcttgcctccaccagaagaggagatgactaagaaacaggtcactctgacctgcatggtcacagacttcatgcctgaagacatttacgtggagtggaccaacaacgggaaaacagagctaaactacaagaacactgaaccagtcctggactctgatggttcttacttcatgtacagcaagctgagagtggagaagaagaactgggtggagagaaatagctactcctgttcagtggtccacgagggtctgcacaatcaccacacgactaagagcttctcccggactccgggtaagggcggaggtggtgcaggaggcggtggagacgttgccctgacacagacccccgtggcccagcccgtgaccctgggcgaccaggccagcatcagctgcaggagcagccagagcttggttcacagcaacggcaggacctacctggagtggtacctgcagaagccgggacagagcccccagctgctgatctacaaggtgagcaataggttcagcggcgtgcccgacaggttcataggcagtggaagcggcagcgatttcaccctgaccattagcagggtggagcccgaggacctgggagtgtactactgcttccaggcaacccacgaccccaacaccttcggcgctggaactaagctggagctgaagggtggcggaggatctggcggaggcggtagtggcggtggcggatctcaggtgcagctccagcagagcggtgccgagctggttaagcccggtagcagcgtgaagatcagctgcaaggccagcggctacaccttcaccagccacttcatccactggatcaaacagcagcccggcaacggcctggagtggatcggcggcatctaccccggagacggcgacaccgagtacaatcagcagttcaacggaaaggccaccctgaccgccgacaagagcagcagcaccgcctacatgaggctgagcagcctgaccagcgaggacagcgccgtgtacttctgcgccaccagggtgcccagctactggttcttcgacttctggggccctggcacgatggtcaccgtgtcttcttaa

SEQ ID NO: 303 - DNA, 705 bp, Artificial Sequence
  Description of Artificial Sequence: Synthetic polynucleotide
atggaatggagctgggtctttctcttcttcctgtcagtaacgactggtgtccactccgacatcctgctgacccaaagcccggcaatcctgagcgtgaggcccggtgagagggtgagcttcagctgcagggccagccagtccctgggcaccagcatccactggtatcaacaaaggaccgacggcagccccaggctgctgatcaagtacgccagcgagagcattagcggcatccccagcaggttcagcgggagcggcagcggcaccgacttcactctgagcatcaacagcgtggagagcgaggacatcgccgactactactgccagcagagcaacagctggccaatcaccttcggcgcaggcaccaagctggagctgaaacgggcagatgctgcaccaactgtatccatcttcccaccatccagtgagcagttaacatctggaggtgcctcagtcgtgtgcttcttgaacaacttctaccccaaagacatcaatgtcaagtggaagattgatggcagtgaacgacaaaatggcgtcctgaacagttggactgatcaggacagcaaagacagcacctacagcatgagcagcaccctcacgttgaccaaggacgagtatgaacgacataacagctatacctgtgaggccactcacaagacatcaacttcacccattgtcaagagcttcaacaggaatgagtgttgataa

SEQ ID NO: 304 - protein, 288 aa, Artificial Sequence
  Description of Artificial Sequence: Synthetic polypeptide
MWVRQVPWSFTWAVLQLSWQSGWLLEVPNGPWRSLTFYPAWLTVSEGANATFTCSLSNWSEDLMLNWNRLSPSNQTEKQAAFCNGLSQPVQDARFQIIQLPNRHDFHMNILDTRRNDSGIYLCGAISLHPKAKIEESPGAELVVTERILETSTRYPSPSPKPEGRFQGMVIGIMSALVGIPVLLLLAWALAVFCSTSMSEARGAGSKDDTLKEEPSAAPVPSVAYEELDFQGREKTPELPTACVHTEYATIVFTEGLGASAMGRRGSADGLQGPRPPRHEDGHCSWPL

SEQ ID NO: 305 - protein, 446 aa, Artificial Sequence; identical to SEQ ID NO: 41
  Description of Artificial Sequence: Synthetic polypeptide

SEQ ID NO: 306 - protein, 446 aa, Artificial Sequence; identical to SEQ ID NO: 41
  Description of Artificial Sequence: Synthetic polypeptide

SEQ ID NO: 307 - protein, 446 aa, Artificial Sequence; identical to SEQ ID NO: 95
  Description of Artificial Sequence: Synthetic polypeptide

SEQ ID NO: 308 - protein, 446 aa, Artificial Sequence; identical to SEQ ID NO: 95
  Description of Artificial Sequence: Synthetic polypeptide

SEQ ID NO: 309 - protein, 457 aa, Artificial Sequence; identical to SEQ ID NO: 149
  Description of Artificial Sequence: Synthetic polypeptide

SEQ ID NO: 310 - protein, 457 aa, Artificial Sequence; identical to SEQ ID NO: 149
  Description of Artificial Sequence: Synthetic polypeptide

SEQ ID NO: 311 - protein, 448 aa, Artificial Sequence; identical to SEQ ID NO: 203
  Description of Artificial Sequence: Synthetic polypeptide

SEQ ID NO: 312 - protein, 448 aa, Artificial Sequence; identical to SEQ ID NO: 203
  Description of Artificial Sequence: Synthetic polypeptide

SEQ ID NO: 313 - protein, 449 aa, Artificial Sequence; identical to SEQ ID NO: 257
  Description of Artificial Sequence: Synthetic polypeptide

SEQ ID NO: 314 - protein, 449 aa, Artificial Sequence; identical to SEQ ID NO: 257
  Description of Artificial Sequence: Synthetic polypeptide

SEQ ID NO: 315 - protein, 8 aa, Gallus gallus
SIINFEKL

SEQ ID NO: 316 - protein, 116 aa, Artificial Sequence
  Description of Artificial Sequence: Synthetic polypeptide
QIQLVQSGPELKKPGETVKISCKASGYTFTNYLLNWVKQAPGKGLKWMGWINTYTGEPTYTDDFKGRFAFSLATSASTAYLQINNLKNEDTATYFCVRLAGTKDYWGQGTTLTVSS

SEQ ID NO: 317 - protein, 112 aa, Artificial Sequence
  Description of Artificial Sequence: Synthetic polypeptide
DIVMTQAAFSNPVTLGTSASISCRSSKSLLHSNGITYLYWYLQKPGQSPQLLIYQMSNLASGVPDRFSSSGSGTDFTLRISRVEAEDVGVYYCAQNLELPRTFGGGTKLEIK

SEQ ID NO: 318 - protein, 116 aa, Artificial Sequence
  Description of Artificial Sequence: Synthetic polypeptide
QVKLQQSGPELKKPGETVKISCKASGYTFTNYGMNWVKQAPGKGLKWMGWINTYTGESTYADDFKGRFAFSLETSASAAYLQINNLKNEDTATYFCARFAIKGDYWGQGTTVTVSS

SEQ ID NO: 319 - protein, 112 aa, Artificial Sequence
  Description of Artificial Sequence: Synthetic polypeptide
DIVLTQSPFSNPVTLGTSASISCRSTKSLLHSNGITYLYWYLQKPGQSPQLLIYQMSNLASGVPDRFSSSGSGTDFTLRISRVEAEDVGVYYCAQNLEIPRTFGGGTKLEIK

SEQ ID NO: 320 - protein, 127 aa, Artificial Sequence
  Description of Artificial Sequence: Synthetic polypeptide
EVQLLESGGGVVQPGRSLRLSCAASGFTFSSYGMHWVRQAPGKGLEWVAVISYDGSNKYYADSVKGRFTISRDNSKNTLYLQMNSLRAEDTAVYYCAKDMGWGSGWRPYYYYGMDVWGQGTTVTVSS

SEQ ID NO: 321 - protein, 107 aa, Artificial Sequence
  Description of Artificial Sequence: Synthetic polypeptide
ELQMTQSPSSLSASVGDRVTITCRTSQSISSYLNWYQQKPGQPPKLLIYWASTRESGVPDRFSGSGSGTDFTLTISSLQPEDSATYYCQQSYDIPYTFGQGTKLEIK

SEQ ID NO: 322 - protein, 118 aa, Artificial Sequence
  Description of Artificial Sequence: Synthetic polypeptide
QVQLQQSGPELVKPGASVKMSCKASGYTFTSYHIQWVKQRPGQGLEWIGWIYPGDGSTQYNEKFKGKTTLTADKSSSTAYMLLSSLTSEDSAIYFCAREGTYYAMDYWGQGTSVTVSS

SEQ ID NO: 323 - protein, 112 aa, Artificial Sequence
  Description of Artificial Sequence: Synthetic polypeptide
DVLMTQTPLSLPVSLGDQVSISCRSSQSIVHSNGNTYLEWYLQKPGQSPKLLIYKVSNRFSGVPDRFSGSGSGTDFTLKISRVEAEDLGVYYCFQGSHVPRTFGGGTKLEIK

SEQ ID NO: 324 - protein, 119 aa, Artificial Sequence
  Description of Artificial Sequence: Synthetic polypeptide
EVQLQESGPSLVRPSQTLSLTCSVTGDSITSSYWNWIRKFPGNKLEYMGYITYSGNTYYTPSLKSRISITRDTSKNQYFLQLNSVTTEDTATYYCSRDYGRGDYAMVYWGQGTSVTVSS

SEQ ID NO: 325 - protein, 107 aa, Artificial Sequence
  Description of Artificial Sequence: Synthetic polypeptide
DVVLTQSPATLSVTPGDSVSLSCRASQSIINNLHWYHQKSHESPRLLIKYASQSISGIPSRFSGSGSGTDFTLSINSVETEDFGVYFCQQSGSWPYTFGGGSNLEIK

SEQ ID NO: 326 - protein, 120 aa, Artificial Sequence [sequence omitted]

SEQ ID NO: 327 - protein, 111 aa, Artificial Sequence [sequence omitted]

SEQ ID NO: 328 - protein, 113 aa, Artificial Sequence [sequence omitted]

SEQ ID NO: 329 - protein, 107 aa, Artificial Sequence [sequence omitted]

SEQ ID NO: 330 - protein, 107 aa, Artificial Sequence [sequence omitted]

SEQ ID NO: 331 - protein, 327 aa, Artificial Sequence
  Description of Artificial Sequence: Synthetic polypeptide
ASTKGPSVFPLAPCSRSTSESTAALGCLVKDYFPEPVTVSWNSGALTSGVHTFPAVLQSSGLYSLSSVVTVPSSSLGTKTYTCNVDHKPSNTKVDKRVESKYGPPCPSCPAPEFLGGPSVFLFPPKPKDTLMISRTPEVTCVVVDVSQEDPEVQFNWYVDGVEVHNAKTKPREEQFNSTYRVVSVLTVLHQDWLNGKEYKCKVSNKGLPSSIEKTISKAKGQPREPQVYTLPPSQEEMTKNQVSLTCLVKGFYPSDIAVEWESNGQPENNYKTTPPVLDSDGSFFLYSRLTVDKSRWQEGNVFSCSVMHEALHNHYTQKSLSLSLGK

SEQ ID NO: 332 - protein, 330 aa, Artificial Sequence
  Description of Artificial Sequence: Synthetic polypeptide
ASTKGPSVFPLAPSSKSTSGGTAALGCLVKDYFPEPVTVSWNSGALTSGVHTFPAVLQSSGLYSLSSVVTVPSSSLGTQTYICNVNHKPSNTKVDKKVEPKSCDKTHTCPPCPAPEAAGGPSVFLFPPKPKDTLMISRTPEVTCVVVDVSHEDPEVKFNWYVDGVEVHNAKTKPREEQYNSTYRVVSVLTVLHQDWLNGKEYKCKVSNKALPAPIEKTISKAKGQPREPQVYTLPPSRDELTKNQVSLWCLVKGFYPSDIAVEWESNGQPENNYKTTPPVLDSDGSFFLYSKLTVDKSRWQQGNVFSCSVMHEALHNHYTQKSLSLSPGK

SEQ ID NO: 333 - protein, 330 aa, Artificial Sequence
  Description of Artificial Sequence: Synthetic polypeptide
ASTKGPSVFPLAPSSKSTSGGTAALGCLVKDYFPEPVTVSWNSGALTSGVHTFPAVLQSSGLYSLSSVVTVPSSSLGTQTYICNVNHKPSNTKVDKKVEPKSCDKTHTCPPCPAPEAAGGPSVFLFPPKPKDTLMISRTPEVTCVVVDVSHEDPEVKFNWYVDGVEVHNAKTKPREEQYNSTYRVVSVLTVLHQDWLNGKEYKCKVSNKALPAPIEKTISKAKGQPREPQVYTLPPSRDELTKNQVSLSCAVKGFYPSDIAVEWESNGQPENNYKTTPPVLDSDGSFFLVSKLTVDKSRWQQGNVFSCSVMHEALHNHYTQKSLSLSPGK
